(19) United States
(12) Patent Application Publication
(10) Pub. No.: US 2020/0199234 A1
(43) Pub. Date: Jun. 25, 2020

(54) TUMOR-TARGETED AGONISTIC CD28 ANTIGEN BINDING MOLECULES

(71) Applicant: Hoffmann-La Roche Inc., Little Falls, NJ (US)

(72) Inventors: Guy GEORGES, Penzberg (DE); Thomas HOFER, Schlieren (CH); Ralf HOSSE, Schlieren (CH); Christian KLEIN, Schlieren (CH); Ekkehard MOESSNER, Schlieren (CH); Johannes SAM, Schlieren (CH); Pablo UMAÑA, Schlieren (CH); Jenny THOM, Schlieren (CH); Stephan GASSER, Schlieren (CH); Jean-Baptiste VALLIER, Schlieren (CH); Tanja FAUTI, Schlieren (CH)

(73) Assignee: Hoffmann-La Roche Inc., Little Falls, NJ (US)

(21) Appl. No.: 16/721,272

(22) Filed: Dec. 19, 2019

(30) Foreign Application Priority Data
Dec. 21, 2018 (EP) 18215121.7
Jul. 23, 2019 (EP) 19187709.1
Sep. 6, 2019 (EP) 19196006.1

(51) Int. Cl. C07K 16/28; C07K 16/30; C07K 16/40; C07K 16/32; A61P 35/00

(52) U.S. Cl. CPC C07K 16/2818; A61K 2039/505; C07K 16/40; C07K 16/30; C07K 16/32; C07K 16/2878; C07K 16/286; C07K 16/2896; C07K 16/2803; A61P 35/00; C07K 2317/31; C07K 2317/35; C07K 2317/75; C07K 2317/92; C07K 2317/52; C07K 2317/565; C07K 2317/55; C07K 16/3007

(57) ABSTRACT

The present invention relates to tumor targeted bispecific agonistic antigen binding molecules characterized by monovalent binding to CD28, methods for their production, pharmaceutical compositions containing these antibodies, and methods of using the same.

### FIELD OF THE INVENTION

[0001] The present invention relates to tumor-targeted bispecific agonistic CD28 antigen binding molecules characterized by monovalent binding to CD28, methods for their production, pharmaceutical compositions containing these molecules, and their use as immunomodulators in the treatment of cancer.

### BACKGROUND

[0002] Cancer immunotherapy is becoming an increasingly effective therapy option that can result in dramatic and durable responses in cancer types such as melanoma, non-small cell lung cancer and renal cell carcinoma. This is mostly driven by the success of several immune checkpoint blockades including anti-PD-1 (e.g. Keytruda, Merck; Opdivo, BMS), anti-CTLA-4 (e.g. Yervoy, BMS) and anti-PD-L1 (e.g. Tecentriq, Roche). These agents are likely to serve as standard of care for many cancer types, or as the backbone of combination therapies, however, only a fraction of patients (<25%) benefits from such therapies. Furthermore, various cancers (prostate cancer, colorectal cancer, pancreatic cancer, sarcomas, non-triple negative breast cancer etc.) present primary resistance to these immunomodulators. A number of reports indicate that the absence of pre-existing anti-tumor T cells contributes to the absence or poor response of some patients. In summary, despite impressive anti-cancer effects of existing immunotherapies, there is a clear medical need for addressing a large cancer patient population and for developing therapies that aim to induce and enhance novel tumor-specific T cell responses.

[0003] CD28 is the founding member of a subfamily of costimulatory molecules characterized by paired V-set immunoglobulin superfamily (IgSF) domains attached to single transmembrane domains and cytoplasmic domains that contain critical signaling motifs (Carreno and Collins, 2002). Other members of the subfamily include ICOS, CTLA-4, PD1, PD1H, TIGIT, and BTLA (Chen and Flies, 2013). CD28 expression is restricted to T cells and prevalent on all naïve and a majority of antigen-experienced subsets, including those that express PD-1 or CTLA-4. CD28 and CTLA-4 are highly homologous and compete for binding to the same B7 molecules CD80 and CD86, which are expressed on dendritic cells, B cells, macrophages, and tumor cells (Linsley et al., 1990). The higher affinity of CTLA-4 for the B7 family of ligands allows CTLA-4 to outcompete CD28 for ligand binding and suppress effector T cells responses (Engelhardt et al., 2006). In contrast, PD-1 was shown to inhibit CD28 signaling by in part dephosphorylating the cytoplasmic domain of CD28 (Hui et al., 2017). Ligation of CD28 by CD80 or CD86 on the surface of professional antigen-presenting cells is strictly required for functional de novo priming of naïve T cells, subsequent clonal expansion, cytokine production, target cell lysis, and formation of long-lived memory. Binding of CD28 ligands also promotes the expression of inducible co-stimulatory receptors such as OX-40, ICOS, and 4-1BB (reviewed in Acuto and Michel, 2003). Upon ligation of CD28, a disulfide-linked homodimer, the membrane proximal YMNM motif and the distal PYAP motif have been shown to complex with several kinases and adaptor proteins (Boomer and Green, 2010). These motifs are important for the induction of IL2 transcription, which is mediated by the CD28-dependent activation of NFAT, AP-1, and NFκB family transcription factors (Fraser et al., 1991) (June et al., 1987) (Thompson et al., 1989). However, additional poorly characterized sites for phosphorylation and ubiquitination are found within the cytoplasmic domain of CD28. As reviewed by (Esensten et al., 2016), CD28-initiated pathways have critical roles in promoting the proliferation and effector function of conventional T cells. CD28 ligation also promotes the anti-inflammatory function of regulatory T cells. CD28 co-stimulates T cells by in part augmenting signals from the T cell receptor, but was also shown to mediate unique signaling events (Acuto and Michel, 2003; Boomer and Green, 2010; June et al., 1987). Signals specifically triggered by CD28 control many important aspects of T cell function, including phosphorylation and other post-translational modifications of downstream proteins (e.g., PI3K mediated phosphorylation), transcriptional changes (eg. Bcl-xL expression), epigenetic changes (e.g. IL-2 promoter), cytoskeletal remodeling (e.g. orientation of the microtubule-organizing center) and changes in the glycolytic rate (e.g. glycolytic flux). CD28-deficient mice have reduced responses to infectious pathogens, allograft antigens, graft-versus-host disease, contact hypersensitivity and asthma (Acuto and Michel, 2003). Lack of CD28-mediated co-stimulation results in reduced T cell proliferation in vitro and in vivo, in severe inhibition of germinal-centre formation and immunoglobulin isotype-class switching, reduced T helper (Th)-cell differentiation and the expression of Th2-type cytokines. CD4-dependent cytotoxic CD8+ T-cell responses are also affected. Importantly, CD28-deficient naïve T cells showed a reduced proliferative response particularly at lower antigen concentrations. A growing body of literature supports the idea that engaging CD28 on T cells has anti-tumor potential. Recent evidence demonstrates that the anti-cancer effects of PD-L1/PD-1 and CTLA-4 checkpoint inhibitors depend on CD28 (Kamphorst et al., 2017; Tai et al., 2007). Clinical studies investigating the therapeutic effects of CTLA-4 and PD-1 blockade have shown exceptionally promising results in patients with advanced melanoma and other cancers. In addition, infusion of genetically engineered T cells expressing artificial chimeric T cell receptors comprising an extracellular antigen recognition domain fused to the intracellular TCR signaling domains (CD3z) and intracellular co-stimulatory domains (CD28 and/or 4-1BB domains) has shown high rates and durability of response in B cell cancers and other cancers.

[0004] CD28 agonistic antibodies can be divided into two categories: (i) CD28 superagonistic antibodies and (ii) CD28 conventional agonistic antibodies. Normally, for the activation of naïve T cells both engagement of the T cell antigen receptor (TCR, signal 1) and costimulatory signaling by CD28 (signal 2) is required. CD28 Superagonists (CD28SA) are CD28-specific monoclonal antibodies, which are able to autonomously activate T cells without overt T cell receptor engagement (Hünig, 2012). In rodents, CD28SA activates conventional and regulatory T cells. CD28SA antibodies are therapeutically effective in multiple models of autoimmunity, inflammation and transplantation. However, a phase I study of the human CD28SA antibody TGN1412 resulted in a life-threatening cytokine storm in 2006. Follow-up studies have suggested that the toxicity was caused by dosing errors due to differences in the CD28 responsiveness of human T cells and T cells of preclinical animal models. TGN1412 is currently being re-evaluated in an open-label, multi-center dose escalation study in RA patients and patients with metastatic or unresectable advanced solid malignancies. CD28 conventional agonistic antibodies, such as clone 9.3, mimic CD28 natural ligands and are only able to enhance T cell activation in presence of a T cell receptor signal (signal 1). Published insights indicate that the binding epitope of the antibody has a major impact on whether the agonistic antibody is a superagonist or a conventional agonist (Beyersdorf et al., 2005). The superagonistic TGN1412 binds to a lateral motif of CD28, while the conventional agonistic molecule 9.3 binds close to the ligand binding epitope. As a consequence of the different binding epitopes, superagonistic and conventional agonistic antibodies differ in their ability to form linear complexes of CD28 molecules on the surface of T cells. Precisely, TGN1412 is able to efficiently form linear arrays of CD28, which presumably leads to aggregated signaling components which are sufficient to surpass the threshold for T cell activation. The conventional agonist 9.3, on the other hand, leads to complexes which are not linear in structure. An attempt to convert conventional agonistic binders based on the 9.3 clone has been previously published (Otz et al., 2009) using a recombinant bi-specific single-chain antibody directed to a melanoma-associated proteoglycan and CD28. The reported bispecific single chain antibody was reported to exert “supra-agonistic” activity despite the use of a conventional CD28 agonistic binder 9.3, based in the intrinsic tendency of bispecific single chain antibodies to form multimeric constructs.

[0005] It has been found that a better T cell activation is achieved when limiting amounts of anti-CD3 bispecific antibodies, i.e. T cell bispecific antibodies (TCBs) such as CEA-TCB, are combined with agonistic anti-CD28 molecules. Given, that CD28 is expressed at baseline on T cells in various tumor indications (Lavin et al., 2017; Tirosh et al., 2016, Zheng et al., 2017) and activation of CD28 signaling enhances T cell receptor signals, the combination of a TCB molecule with a tumor-targeted CD28 molecule is expected to act synergistically to induce strong and long-lasting anti-tumor responses. Thus, we herein describe novel tumor-targeted agonistic CD28 molecules which display synergy with TCBs and require CD28 binding monovalency for strict tumor target dependence in the presence of TCB signals.

[0006] Immunotherapy of Solid Tumors

[0007] The treatment of solid tumors is an ongoing challenge, with little advancements seen over the last years. Typically, the treatment will be a combination of surgery and chemotherapy and/or radiotherapy. While quite a few new treatment modalities have been developed recently, there is still a need for further improvements, to increase survival rates of patients suffering from solid tumors, and improve their quality of life. Solid tumors rarely express one tumor specific antigen. For most solid tumors, it is more common to find a tumor associated antigen (TAA) that is enriched on tumors but also expressed at very low levels on normal tissues. The TAA is preferably presented on the surface of the solid tumor cell or on a cell of the tumor stroma. This is the case for many frequently targeted TAAs for solid tumors, including Fibroblast Activation Protein (FAP), Carcinoembryonic Antigen (CEA), Folate receptor alpha (FolR1), Melanoma-associated Chondroitin Sulfate Proteoglycan (MCSP), Epidermal Growth Factor Receptor (EGFR), human epidermal growth factor receptor 2 (HER2) and p95HER2. Further TAAs include HER3, EpCAM, TPBG (5T4), mesothelin, MUC1, and PSMA. Bispecific agonistic CD28 antigen binding molecule comprising an antigen binding domain that specifically binds to a tumor associated antigen will thus be directed primarily to the tumor surface or tumor microenvironment and will specifically activate T cells in the proximity of the tumor while a systemic activation may be avoided.

[0008] Rationale for Targeting CD28 Agonism to B Cell Malignancies

[0009] Non-Hodgkin's lymphoma (NHL) is one of the leading causes of cancer death in the United States and in Europe. Follicular lymphoma (FL) is indolent in its course and has a slow rate of evolution, with a median survival of 8 to 10 years; patients in advanced clinical stages usually are not curable. Likewise, in 2% to 3% of patients per year, the phenotype of FL can transform into an aggressive, large cell lymphoma, a critical event in the course of the disease and one that is associated with increased lymphoma-related mortality. Mantle cell lymphoma and diffuse large B cell lymphoma (DLBCL) are more aggressive and, if untreated, have a median survival rate of only 6 months. The lack of curative outcomes for many patients with both indolent and aggressive NHL subtypes remains an unmet medical need, despite significant advances in immune-therapeutics that have extended progression free-survival times. During the past several years, significant prolonged survival in DLBCL has been observed, particularly with the addition of the anti-CD20 monoclonal antibody, rituximab (Rituxan®, MabThera®) to intensive cytotoxic chemotherapeutic regimens. However, despite conventional treatment for previously untreated DLBCL is curative in intent, the majority of patients will eventually relapse. Likewise, advanced FL remains largely incurable by current SoC and is characterized by repeated relapses and progressively shorter remissions. Currently, many new generation monoclonal antibodies are in different preclinical and clinical phases of assessment to further improve the outcome of NHL patients and overcome mechanisms of rituximab resistance. High dose chemotherapy with autologous stem cell support or allogeneic stem cell transplantation provides a curative option for only a minority (10%) of patients with relapsed/refractory (r/r) DLBCL and is associated with substantial treatment-related mortality. Other approaches for the treatment of NHL currently in development include molecular targeted compounds like venetoclax and BET-inhibitors. Recently approved novel agents include lenalidomide, idelalisib, and copanlisib. Chimeric antigen receptor (CAR) T-cell therapy has been approved for the treatment of aggressive forms of r/r B-NHL, but this therapy is available only in limited settings and can be associated with fatal neurologic events and cytokine release syndrome (CRS). Bispecific antibody constructs redirecting the lysis of cytotoxic cells to malignant B cells are currently in development and have shown very promising efficacy against NHL. Chemotherapy-free treatments are envisioned for the future of NHL and will likely be based on bispecific antibodies or chimeric antigen receptor T cells (CAR T cells). A CD28 agonist targeted against a B cell surface antigen in combination with immunotherapy shall enhance the survival and/or cure rates for patients with B cell malignancies, without compromising their quality of life.

[0010] B Cell Surface Antigens as a Target for B Cell Malignancies

[0011] TAAs related to B cell malignancies are B cell surface antigens. The human CD19 antigen is a 95 KDa transmembrane glycoprotein belonging to the immunoglobulin superfamily. CD19 is classified as a type I transmembrane protein, with a single transmembrane domain, a cytoplasmic C-terminus, and extracellular N-terminus. In normal cells, it is the most ubiquitously expressed protein in the B lymphocyte lineage. CD19 expression is maintained in B-lineage cells that have undergone neoplastic transformation, and therefore CD19 is useful in diagnosis of leukemias and lymphomas using monoclonal antibodies (mAbs) and flow cytometry, so does the CD20 antigen. Because B lineage leukemias and lymphomas rarely lose CD19 expression, and because it is not expressed in the pluripotent stem cell, it has become the target for a variety of immunotherapeutic agents, including immunotoxins. CD79 is the signaling component of the B-cell receptor consisting of a covalent heterodimer containing CD79a (Iga, mb-1) and CD79b (Igβ, B29). CD79a and CD79b each contain an extracellular immunoglobulin (Ig) domain, a transmembrane domain, and an intracellular signaling domain, an immunoreceptor tyrosine-based activation motif (ITAM) domain, like other signalling proteins such as CD3 or activatory Fcγ receptor. CD79a and CD79b are thus transmembrane proteins that compose the signalling subunits of the B cell receptor (BCR). CD79b is a 39 KDa protein exclusively expressed on B cells and, in cooperation with CD79a, initiates the signal transduction cascade downstream of the BCR, which leads to internalization of the BCR complex, its translocation to the endosomes, and antigen presentation. In B cells, antigen-induced BCR clustering triggers tyrosine phosphorylation of the ITAM of CD79a and CD79b by Src kinases. This leads to the recruitment and activation of an array of effector molecules belonging to the BCR signalling cascade, including the most notable SYK and BLNK. Further downstream, recruitment of PLCg2, Btk, and ERK facilitate calcium flux and activate the B cells, which are then ready to receive additional co-activating signals that will drive their proliferation and differentiation into memory or effector cells. During this process, B cells become robust APCs and release cytokines that can influence the outcome and quality of the immune response. In addition to their role in BCR signalling, the CD79 subunits are also essential for the transport and display of membrane-bound Ig from the endoplasmic reticulum to the cell surface. The average surface expression of CD79b on NHLs is similar to that on normal B-cells, but with a greater range. Given the expression of CD79b, it is beneficial to produce therapeutic antibodies to the CD79b antigen that create minimal or no antigenicity when administered to patients, especially for chronic treatment.

[0012] It has been found that a better T cell activation is achieved when limiting amounts of anti-CD3 bispecific antibodies, i.e. T cell bispecific antibodies (TCBs) such as for example a CD20/CD3 bispecific antibody, are combined with agonistic anti-CD28 molecules. Given, that CD28 is expressed at baseline on T cells in various tumor indications (Lavin et al., 2017; Tirosh et al., 2016, Zheng et al., 2017) and activation of CD28 signaling enhances T cell receptor signals, the combination of T cell bispecific antibodies with bispecific agonistic CD28 antigen binding molecules targeting a B cell surface antigen is expected to act synergistically to induce strong and long-lasting anti-tumor responses. Thus, we herein describe novel bispecific agonistic CD28 antigen binding molecules targeting a B cell surface antigen which display synergy with TCBs and require CD28 binding monovalency for strict tumor target dependence in the presence of TCB signals.

[0013] Immunotherapy in Multiple Myeloma

[0014] Affecting ˜75,000 new patients every year in the EU and US, multiple myeloma (MM) is one of the most common hematological malignancies with remaining high unmet medical need. Multiple myeloma is characterized by terminally differentiated plasma cells that secrete non-functional monoclonal immunoglobulins. In the short-term, the immunomodulatory drugs such as lenalidomide and pomalidomide, and proteasome inhibitors such as carfilzomib or bortezomib may remain the backbone of 1st line therapy for multiple myeloma (Moreau et al, 2016). However, these drugs do not target specifically the diseased tumor cells e.g. diseased plasma cells (PC). Efforts have been made towards selectively depleting the plasma cells in multiple myeloma. The lack of surface proteins that specifically mark plasma cells has hampered the development of antibodies or cellular therapies for multiple myeloma. So far, there are few cases of successful biologics, including daratumumab (anti-CD38) and elotuzumab (anti-CD319), with the caveat that both antigens are also expressed on other normal tissues including hematopoietic lineages and immune effector cells, which may limit their long-term clinical use. B cell maturation antigen (BCMA), a transmembrane glycoprotein in the tumor necrosis factor receptor superfamily 17 (TNFRSF17), is expressed at significantly higher levels in all patient MM cells but not on other normal tissues except normal plasma cells. BCMA-chimeric antigen receptor (CAR) T-cells have already shown significant clinical activities in patients with RRMM who have undergone at least three prior treatments, including a proteasome inhibitor and an immunomodulatory agent. Additional modalities, including anti-BCMA antibody-drug conjugate also has achieved significant clinical responses in patients who failed at least three prior lines of therapy, including an anti-CD38 antibody, a proteasome inhibitor, and an immunomodulatory agent (Cho et al, 2018). One challenge of e.g. BCMA- or CD38-targeted therapy lies in the presence of high levels of soluble BCMA or CD38 in the serum of MM patients, which may reduce the amount of active drug in the patient. An alternative might be new targets, such as the G protein-coupled receptor class C group 5 member D (GPRC5D), that is differentially expressed by plasma cells in multiple myeloma versus plasma cells from healthy donors, and has no soluble form. It has been reported that GPRC5D is associated with prognosis and tumor load in multiple myeloma patients (Atamaniuk, J. et al., 2012; and Cohen, Y., et al., 2013). GPRC5D is an orphan receptor with no known ligand(s) and largely unknown biology in men in general and in cancer specifically. The GPRC5D encoding gene, which is mapped on chromosome12p13.3, contains three exons and spans about 9.6 kb (Brauner-Osborne, H. et al. 2001). The large first exon encodes the seven-transmembrane domain. It has been shown that GPRC5D is involved in keratin formation in hair follicles in animals (Gao, Y. et al., 2016, and Inoue, S. et al., 2004). WO 2018/017786 A2 discloses GPRC5D-specific antibodies or antigen-binding fragments.

[0015] Rationale for targeting CD28 agonism to diseased plasma cells in Multiple Myeloma CD28 agonism in Multiple Myeloma may exert different biological functions on immune, respective MM plasma cells. While co-activation of T-cells via CD28 is expected to drive anti-tumor responses, CD28 agonism on MM cells mediates pro-survival signaling via regulation of PI3K/Akt, FoxO3a, and Bimm which in turn is described to induce chemotherapeutic resistance in multiple myeloma (Murray M. E. et al, 2014). Over-expression of CD28 on newly diagnosed Multiple Myeloma plasma cells is described to correlate with worse clinical outcome (Bahlis et al., 2007). However, while CD28 activation enhances myeloma cell survival, its activation inhibits myeloma cell proliferation. Agonizing CD28 in presence of a strong immune cell mediated response, such as a T-cell bispecific activation of T-cells, can further boost efficient anti-tumor responses. We herein provide bispecific agonistic CD28 antigen binding molecules that specifically bind a human Multiple Myeloma (MM) cell surface antigen. Particularly, the bispecific agonistic CD28 antigen binding molecules according to the invention targeting the TAAs selected from BCMA, CD38 and GPRC5D and CD28 expressed on T-cells have the potency to treat multiple myeloma as single agent or in combination with other agents such as T cell bispecific antibodies (TCBs) targeting a human MM cell surface antigen.

### SUMMARY

[0016] The present invention describes tumor-targeted bispecific agonistic CD28 antigen binding molecules which achieve a tumor-dependent T cell activation and tumor cell killing without the necessity to form multimers. The bispecific CD28 antigen binding molecules of the present invention are characterized by monovalent binding to CD28 and in that they comprise at least one antigen binding domain capable of specific binding to a tumor-associated antigen (such as Fibroblast Activation Protein (FAP) or Carcinoembryonic Antigen (CEA), CD19 or GPRC5D).

[0017] Furthermore, they possess an Fc domain composed of a first and a second subunit capable of stable association comprising one or more amino acid substitution that reduces the binding affinity of the antigen binding molecule to an Fc receptor and/or effector function. Fc receptor-mediated cross-linking is thereby abrogated and tumor-specific activation is achieved by cross-linking through binding of the at least one antigen binding domain capable of specific binding to a tumor-associated antigen to its antigen.

[0018] Thus, the invention provides a bispecific agonistic CD28 antigen binding molecule characterized by monovalent binding to CD28, comprising

(a) one antigen binding domain capable of specific binding to CD28,
(b) at least one antigen binding domain capable of specific binding to a tumor-associated antigen, and
(c) an Fc domain composed of a first and a second subunit capable of stable association comprising one or more amino acid substitution that reduces the binding affinity of the antigen binding molecule to an Fc receptor and/or effector function.

[0019] In one aspect, a bispecific agonistic CD28 antigen binding molecule as defined below is provided, wherein the Fc domain is an IgG, particularly an IgG1 Fc domain or an IgG4 Fc domain. In one particular aspect, the Fc domain composed of a first and a second subunit capable of stable association is an IgG1 Fc domain. In one aspect, the Fc domain comprises the amino acid substitutions L234A and L235A (numbering according to Kabat EU index). In one aspect, the Fc domain is of human IgG1 subclass and comprises the amino acid mutations L234A, L235A and P329G (numbering according to Kabat EU index).

[0020] In one aspect, provided is a bispecific agonistic CD28 antigen binding molecule as defined herein before, wherein the antigen binding domain capable of specific binding to CD28 comprises

(i) a heavy chain variable region (V_{H}CD28) comprising a heavy chain complementary determining region CDR-H1 of SEQ ID NO: 36, a CDR-H2 of SEQ ID NO: 37, and a CDR-H3 of SEQ ID NO: 38, and a light chain variable region (V_{L}CD28) comprising a light chain complementary determining region CDR-L1 of SEQ ID NO: 39, a CDR-L2 of SEQ ID NO: 40 and a CDR-L3 of SEQ ID NO: 41; or
(ii) a heavy chain variable region (V_{H}CD28) comprising a CDR-H1 of SEQ ID NO: 20, a CDR-H2 of SEQ ID NO: 21, and a CDR-H3 of SEQ ID NO: 22, and a light chain variable region (V_{L}CD28) comprising a CDR-L1 of SEQ ID NO: 23, a CDR-L2 of SEQ ID NO: 24 and a CDR-L3 of SEQ ID NO: 25.

[0021] In one aspect, the antigen binding domain capable of specific binding to CD28 of the bispecific agonistic CD28 antigen binding molecule comprises a heavy chain variable region (V_{H}CD28) comprising a CDR-H1 of SEQ ID NO: 36, a CDR-H2 of SEQ ID NO: 37, and a CDR-H3 of SEQ ID NO: 38, and a light chain variable region (V_{L}CD28) comprising a CDR-L1 of SEQ ID NO: 39, a CDR-L2 of SEQ ID NO: 40 and a CDR-L3 of SEQ ID NO: 41.

[0022] In another aspect, the antigen binding domains capable of specific binding to CD28 of the bispecific agonistic CD28 antigen binding molecule comprises a heavy chain variable region (V_{H}CD28) comprising a CDR-H1 of SEQ ID NO: 20, a CDR-H2 of SEQ ID NO: 21, and a CDR-H3 of SEQ ID NO: 22, and a light chain variable region (V_{L}CD28) comprising a CDR-L1 of SEQ ID NO: 23, a CDR-L2 of SEQ ID NO: 24 and a CDR-L3 of SEQ ID NO: 25.

[0023] Furthermore, provided is a bispecific agonistic CD28 antigen binding molecule as defined herein before, wherein the antigen binding domain capable of specific binding to CD28 comprises a heavy chain variable region (V_{H}CD28) comprising an amino acid sequence that is at least about 95%, 96%, 97%, 98%, 99% or 100% identical to the amino acid sequence of SEQ ID NO:26, and a light chain variable region (V_{L}CD28) comprising an amino acid sequence that is at least about 95%, 96%, 97%, 98%, 99% or 100% identical to the amino acid sequence of SEQ ID NO:27.

[0024] In a further aspect, a bispecific agonistic CD28 antigen binding molecule is provided, wherein the antigen binding domain capable of specific binding to CD28 comprises a heavy chain variable region (V_{H}CD28) comprising an amino acid sequence selected from the group consisting of SEQ ID NO:42, SEQ ID NO:43, SEQ ID NO:44, SEQ ID NO:45, SEQ ID NO:46, SEQ ID NO:47, SEQ ID NO:48, SEQ ID NO:49, SEQ ID NO:50 and SEQ ID NO:51, and a light chain variable region (V_{L}CD28) comprising an amino acid sequence selected from the group consisting of SEQ ID NO:27, SEQ ID NO:52, SEQ ID NO:53, SEQ ID NO:54, SEQ ID NO:55, SEQ ID NO:56, SEQ ID NO:57, SEQ ID NO:58, SEQ ID NO:59, SEQ ID NO:60 and SEQ ID NO:61.

[0025] In another aspect, provided is a bispecific agonistic CD28 antigen binding molecule, wherein the antigen binding domain capable of specific binding to CD28 comprises

[0026] (a) a heavy chain variable region (V_{H}CD28) comprising the amino acid sequence of SEQ ID NO:47 and a light chain variable region (V_{L}CD28) comprising the amino acid sequence of SEQ ID NO:54, or

[0027] (b) a heavy chain variable region (V_{H}CD28) comprising the amino acid sequence of SEQ ID NO:47 and a light chain variable region (V_{L}CD28) comprising the amino acid sequence of SEQ ID NO:27, or

[0028] (c) a heavy chain variable region (V_{H}CD28) comprising the amino acid sequence of SEQ ID NO:51 and a light chain variable region (V_{L}CD28) comprising the amino acid sequence of SEQ ID NO:61, or

[0029] (d) a heavy chain variable region (V_{H}CD28) comprising the amino acid sequence of SEQ ID NO:46 and a light chain variable region (V_{L}CD28) comprising the amino acid sequence of SEQ ID NO:53, or

[0030] (e) a heavy chain variable region (V_{H}CD28) comprising the amino acid sequence of SEQ ID NO:46 and a light chain variable region (V_{L}CD28) comprising the amino acid sequence of SEQ ID NO:54, or

[0031] (f) a heavy chain variable region (V_{H}CD28) comprising the amino acid sequence of SEQ ID NO:46 and a light chain variable region (V_{L}CD28) comprising the amino acid sequence of SEQ ID NO:59, or

[0032] (g) a heavy chain variable region (V_{H}CD28) comprising the amino acid sequence of SEQ ID NO:46 and a light chain variable region (V_{L}CD28) comprising the amino acid sequence of SEQ ID NO:27, or

[0033] (h) a heavy chain variable region (V_{H}CD28) comprising the amino acid sequence of SEQ ID NO:43 and a light chain variable region (V_{L}CD28) comprising the amino acid sequence of SEQ ID NO:27, or

[0034] (i) a heavy chain variable region (V_{H}CD28) comprising the amino acid sequence of SEQ ID NO:42 and a light chain variable region (V_{L}CD28) comprising the amino acid sequence of SEQ ID NO:53, or

[0035] (j) a heavy chain variable region (V_{H}CD28) comprising the amino acid sequence of SEQ ID NO:42 and a light chain variable region (V_{L}CD28) comprising the amino acid sequence of SEQ ID NO:59, or

[0036] (k) a heavy chain variable region (V_{H}CD28) comprising the amino acid sequence of SEQ ID NO:42 and a light chain variable region (V_{L}CD28) comprising the amino acid sequence of SEQ ID NO:27.

[0037] In one particular aspect, a bispecific agonistic CD28 antigen binding molecule is provided, wherein the antigen binding domain capable of specific binding to CD28 comprises a heavy chain variable region (V_{H}CD28) comprising the amino acid sequence of SEQ ID NO:47 and a light chain variable region (V_{L}CD28) comprising the amino acid sequence of SEQ ID NO:54.

[0038] In another particular aspect, a bispecific agonistic CD28 antigen binding molecule is provided, wherein the antigen binding domain capable of specific binding to CD28 comprises a heavy chain variable region (V_{H}CD28) comprising the amino acid sequence of SEQ ID NO:46 and a light chain variable region (V_{L}CD28) comprising the amino acid sequence of SEQ ID NO:53.

[0039] In a further particular aspect, a bispecific agonistic CD28 antigen binding molecule is provided, wherein the antigen binding domain capable of specific binding to CD28 comprises a heavy chain variable region (V_{H}CD28) comprising the amino acid sequence of SEQ ID NO:42 and a light chain variable region (V_{L}CD28) comprising the amino acid sequence of SEQ ID NO:27.

[0040] In one aspect, a bispecific agonistic CD28 antigen binding molecule is provided, wherein the antigen binding domain capable of specific binding to a tumor-associated antigen is an antigen binding domain capable of specific binding to Carcinoembryonic Antigen (CEA).

[0041] In one aspect, provided is a bispecific agonistic CD28 antigen binding molecule as described herein, wherein the antigen binding domain capable of specific binding to CEA comprises

(i) a heavy chain variable region (V_{H}CEA) comprising a CDR-H1 comprising the amino acid sequence of SEQ ID NO: 188, a CDR-H2 comprising the amino acid sequence of SEQ ID NO: 189, and a CDR-H3 comprising the amino acid sequence of SEQ ID NO: 190, and a light chain variable region (V_{L}CEA) comprising a CDR-L1 comprising the amino acid sequence of SEQ ID NO: 191, a CDR-L2 comprising the amino acid sequence of SEQ ID NO: 192, and a CDR-L3 comprising the amino acid sequence of SEQ ID NO: 193; or
(ii) a heavy chain variable region (V_{H}CEA) comprising a CDR-H1 comprising the amino acid sequence of SEQ ID NO: 180, a CDR-H2 comprising the amino acid sequence of SEQ ID NO: 181, and a CDR-H3 comprising the amino acid sequence of SEQ ID NO: 182, and a light chain variable region (V_{L}CEA) comprising a CDR-L1 comprising the amino acid sequence of SEQ ID NO: 183, a CDR-L2 comprising the amino acid sequence of SEQ ID NO: 184, and a CDR-L3 comprising the amino acid sequence of SEQ ID NO: 185; or
(iii) a heavy chain variable region (V_{H}CEA) comprising a CDR-H1 comprising the amino acid sequence of SEQ ID NO: 127, a CDR-H2 comprising the amino acid sequence of SEQ ID NO: 128, and a CDR-H3 comprising the amino acid sequence of SEQ ID NO: 129, and a light chain variable region (V_{L}CEA) comprising a CDR-L1 comprising the amino acid sequence of SEQ ID NO:130, a CDR-L2 comprising the amino acid sequence of SEQ ID NO:131, and a CDR-L3 comprising the amino acid sequence of SEQ ID NO: 132, or
(iv) a heavy chain variable region (V_{H}CEA) comprising a CDR-H1 comprising the amino acid sequence of SEQ ID NO:507, a CDR-H2 comprising the amino acid sequence of SEQ ID NO:508, and a CDR-H3 comprising the amino acid sequence of SEQ ID NO:509, and a light chain variable region (V_{L}CEA) comprising a CDR-L1 comprising the amino acid sequence of SEQ ID NO:510, a CDR-L2 comprising the amino acid sequence of SEQ ID NO:511, and a CDR-L3 comprising the amino acid sequence of SEQ ID NO:512.

[0042] In one aspect, the antigen binding domain capable of specific binding to CEA comprises a heavy chain variable region (V_{H}CEA) comprising an amino acid sequence that is at least about 95%, 96%, 97%, 98%, 99% or 100% identical to the amino acid sequence of SEQ ID NO: 133, and a light chain variable region (V_{L}CEA) comprising an amino acid sequence that is at least about 95%, 96%, 97%, 98%, 99% or 100% identical to the amino acid sequence of SEQ ID NO: 134. Particularly, the antigen binding domain capable of specific binding to CEA comprises a heavy chain variable region (V_{H}CEA) comprising the amino acid sequence of SEQ ID NO: 186, and a light chain variable region (V_{L}CEA) comprising the amino acid sequence of SEQ ID NO: 187.

[0043] In another aspect, provided is a bispecific agonistic CD28 antigen binding molecule, wherein the antigen binding domain capable of specific binding to CEA comprises

[0044] (a) a heavy chain variable region (V_{H}CEA) comprising the amino acid sequence of SEQ ID NO: 194 and a light chain variable region (V_{L}CEA) comprising the amino acid sequence of SEQ ID NO: 195, or

[0045] (b) a heavy chain variable region (V_{H}CEA) comprising the amino acid sequence of SEQ ID NO: 196 and a light chain variable region (V_{L}CEA) comprising the amino acid sequence of SEQ ID NO:197, or

[0046] (c) a heavy chain variable region (V_{H}CEA) comprising the amino acid sequence of SEQ ID NO: 198 and a light chain variable region (V_{L}CEA) comprising the amino acid sequence of SEQ ID NO: 199, or

[0047] (d) a heavy chain variable region (V_{H}CEA) comprising the amino acid sequence of SEQ ID NO:200 and a light chain variable region (V_{L}CEA) comprising the amino acid sequence of SEQ ID NO:201, or

[0048] (e) a heavy chain variable region (V_{H}CEA) comprising the amino acid sequence of SEQ ID NO:202 and a light chain variable region (V_{L}CEA) comprising the amino acid sequence of SEQ ID NO:203, or

[0049] (f) a heavy chain variable region (V_{H}CEA) comprising the amino acid sequence of SEQ ID NO:204 and a light chain variable region (V_{L}CEA) comprising the amino acid sequence of SEQ ID NO:205, or

[0050] (g) a heavy chain variable region (V_{H}CEA) comprising the amino acid sequence of SEQ ID NO:206 and a light chain variable region (V_{L}CEA) comprising the amino acid sequence of SEQ ID NO:207, or

[0051] (h) a heavy chain variable region (V_{H}CEA) comprising the amino acid sequence of SEQ ID NO:208 and a light chain variable region (V_{L}CEA) comprising the amino acid sequence of SEQ ID NO:209, or

[0052] (i) a heavy chain variable region (V_{H}CEA) comprising the amino acid sequence of SEQ ID NO:210 and a light chain variable region (V_{L}CEA) comprising the amino acid sequence of SEQ ID NO:211, or

[0053] (j) a heavy chain variable region (V_{H}CEA) comprising the amino acid sequence of SEQ ID NO:212 and a light chain variable region (V_{L}CEA) comprising the amino acid sequence of SEQ ID NO:213.

[0054] Particularly, the antigen binding domain capable of specific binding to CEA comprises a heavy chain variable region (V_{H}CEA) comprising the amino acid sequence of SEQ ID NO:200 and a light chain variable region (V_{L}CEA) comprising the amino acid sequence of SEQ ID NO:201.

[0055] In another aspect, a bispecific agonistic CD28 antigen binding molecule is provided, wherein the antigen binding domain capable of specific binding to a tumor-associated antigen is an antigen binding domain capable of specific binding to Fibroblast Activation Protein (FAP). In one aspect, provided is a bispecific agonistic CD28 antigen binding molecule as described herein, wherein the antigen binding domain capable of specific binding to FAP comprises (a) a heavy chain variable region (V_{H}FAP) comprising (i) CDR-H1 comprising the amino acid sequence of SEQ ID NO: 12, (ii) CDR-H2 comprising the amino acid sequence of SEQ ID NO: 13, and (iii) CDR-H3 comprising the amino acid sequence of SEQ ID NO: 14, and a light chain variable region (V_{L}FAP) comprising (iv) CDR-L1 comprising the amino acid sequence of SEQ ID NO: 15, (v) CDR-L2 comprising the amino acid sequence of SEQ ID NO: 16, and (vi) CDR-L3 comprising the amino acid sequence of SEQ ID NO: 17, or (b) a heavy chain variable region (V_{H}FAP) comprising (i) CDR-H1 comprising the amino acid sequence of SEQ ID NO:4, (ii) CDR-H2 comprising the amino acid sequence of SEQ ID NO:5, and (iii) CDR-H3 comprising the amino acid sequence of SEQ ID NO:6, and a light chain variable region (V_{L}FAP) comprising (iv) CDR-L1 comprising the amino acid sequence of SEQ ID NO:7, (v) CDR-L2 comprising the amino acid sequence of SEQ ID NO:8, and (vi) CDR-L3 comprising the amino acid sequence of SEQ ID NO:9. In particular, the antigen binding domain capable of specific binding to FAP comprises a heavy chain variable region (V_{H}FAP) comprising (i) CDR-H1 comprising the amino acid sequence of SEQ ID NO: 12, (ii) CDR-H2 comprising the amino acid sequence of SEQ ID NO: 13, and (iii) CDR-H3 comprising the amino acid sequence of SEQ ID NO: 14, and a light chain variable region (V_{L}FAP) comprising (iv) CDR-L1 comprising the amino acid sequence of SEQ ID NO: 15, (v) CDR-L2 comprising the amino acid sequence of SEQ ID NO: 16, and (vi) CDR-L3 comprising the amino acid sequence of SEQ ID NO: 17. In one aspect, a bispecific agonistic CD28 antigen binding molecule is provided, wherein the antigen binding domain capable of specific binding to FAP comprises (a) a heavy chain variable region (V_{H}FAP) comprising an amino acid sequence that is at least about 95%, 96%, 97%, 98%, 99% or 100% identical to the amino acid sequence of SEQ ID NO: 18, and a light chain variable region (V_{L}FAP) comprising an amino acid sequence that is at least about 95%, 96%, 97%, 98%, 99% or 100% identical to the amino acid sequence of SEQ ID NO: 19, or (b) a heavy chain variable region (V_{H}FAP) comprising an amino acid sequence that is at least about 95%, 96%, 97%, 98%, 99% or 100% identical to the amino acid sequence of SEQ ID NO: 10, and a light chain variable region (V_{L}FAP) comprising an amino acid sequence that is at least about 95%, 96%, 97%, 98%, 99% or 100% identical to the amino acid sequence of SEQ ID NO: 11. Particularly, the antigen binding domain capable of specific binding to FAP comprises a heavy chain variable region (V_{H}FAP) comprising the amino acid sequence of SEQ ID NO: 18 and a light chain variable region (V_{L}FAP) comprising the amino acid sequence of SEQ ID NO: 19.

[0056] In another aspect, a bispecific agonistic CD28 antigen binding molecule is provided, wherein the antigen binding domain capable of specific binding to a tumor-associated antigen is an antigen binding domain capable of specific binding to epithelial cell adhesion molecule (EpCAM). In one aspect, provided is a bispecific agonistic CD28 antigen binding molecule as described herein, wherein the antigen binding domain capable of specific binding to EpCAM comprises a heavy chain variable region (V_{H}EpCAM) comprising (i) CDR-H1 comprising the amino acid sequence of SEQ ID NO:515, (ii) CDR-H2 comprising the amino acid sequence of SEQ ID NO:516, and (iii) CDR-H3 comprising the amino acid sequence of SEQ ID NO:517, and a light chain variable region (V_{L}EpCAM) comprising (iv) CDR-L1 comprising the amino acid sequence of SEQ ID NO:518, (v) CDR-L2 comprising the amino acid sequence of SEQ ID NO:519, and (vi) CDR-L3 comprising the amino acid sequence of SEQ ID NO:520. In one aspect, a bispecific agonistic CD28 antigen binding molecule is provided, wherein the antigen binding domain capable of specific binding to EpCAM comprises (a) a heavy chain variable region (V_{H}EpCAM) comprising an amino acid sequence that is at least about 95%, 96%, 97%, 98%, 99% or 100% identical to the amino acid sequence of SEQ ID NO:521, and a light chain variable region (V_{L}EpCAM) comprising an amino acid sequence that is at least about 95%, 96%, 97%, 98%, 99% or 100% identical to the amino acid sequence of SEQ ID NO:522. Particularly, the antigen binding domain capable of specific binding to EpCAM comprises a heavy chain variable region (V_{H}EpCAM) comprising the amino acid sequence of SEQ ID NO:521 and a light chain variable region (V_{L}EpCAM) comprising the amino acid sequence of SEQ ID NO:522.

[0057] In another aspect, a bispecific agonistic CD28 antigen binding molecule is provided, wherein the antigen binding domain capable of specific binding to a tumor-associated antigen is an antigen binding domain capable of specific binding to HER3. In one aspect, provided is a bispecific agonistic CD28 antigen binding molecule as described herein, wherein the antigen binding domain capable of specific binding to HER3 comprises a heavy chain variable region (V_{H}HER3) comprising (i) CDR-H1 comprising the amino acid sequence of SEQ ID NO:523, (ii) CDR-H2 comprising the amino acid sequence of SEQ ID NO:524, and (iii) CDR-H3 comprising the amino acid sequence of SEQ ID NO:525, and a light chain variable region (V_{L}HER3) comprising (iv) CDR-L1 comprising the amino acid sequence of SEQ ID NO:526, (v) CDR-L2 comprising the amino acid sequence of SEQ ID NO:527, and (vi) CDR-L3 comprising the amino acid sequence of SEQ ID NO:528. In one aspect, a bispecific agonistic CD28 antigen binding molecule is provided, wherein the antigen binding domain capable of specific binding to HER3 comprises (a) a heavy chain variable region (V_{H}HER3) comprising an amino acid sequence that is at least about 95%, 96%, 97%, 98%, 99% or 100% identical to the amino acid sequence of SEQ ID NO:529, and a light chain variable region (V_{L}HER3) comprising an amino acid sequence that is at least about 95%, 96%, 97%, 98%, 99% or 100% identical to the amino acid sequence of SEQ ID NO:530. Particularly, the antigen binding domain capable of specific binding to HER3 comprises a heavy chain variable region (V_{H}HER3) comprising the amino acid sequence of SEQ ID NO:529 and a light chain variable region (V_{L}HER3) comprising the amino acid sequence of SEQ ID NO:530.

[0058] In yet another aspect, a bispecific agonistic CD28 antigen binding molecule is provided, wherein the antigen binding domain capable of specific binding to a tumor-associated antigen is an antigen binding domain capable of specific binding to CD30. In one aspect, provided is a bispecific agonistic CD28 antigen binding molecule as described herein, wherein the antigen binding domain capable of specific binding to CD30 comprises a heavy chain variable region (V_{H}CD30) comprising (i) CDR-H1 comprising the amino acid sequence of SEQ ID NO:531, (ii) CDR-H2 comprising the amino acid sequence of SEQ ID NO:532, and (iii) CDR-H3 comprising the amino acid sequence of SEQ ID NO:533, and a light chain variable region (V_{L}CD30) comprising (iv) CDR-L1 comprising the amino acid sequence of SEQ ID NO:534, (v) CDR-L2 comprising the amino acid sequence of SEQ ID NO:535, and (vi) CDR-L3 comprising the amino acid sequence of SEQ ID NO:536. In one aspect, a bispecific agonistic CD28 antigen binding molecule is provided, wherein the antigen binding domain capable of specific binding to CD30 comprises (a) a heavy chain variable region (V_{H}CD30) comprising an amino acid sequence that is at least about 95%, 96%, 97%, 98%, 99% or 100% identical to the amino acid sequence of SEQ ID NO:537, and a light chain variable region (V_{L}CD30) comprising an amino acid sequence that is at least about 95%, 96%, 97%, 98%, 99% or 100% identical to the amino acid sequence of SEQ ID NO:538. Particularly, the antigen binding domain capable of specific binding to CD30 comprises a heavy chain variable region (V_{H}CD30) comprising the amino acid sequence of SEQ ID NO:537 and a light chain variable region (V_{L}CD30) comprising the amino acid sequence of SEQ ID NO:538.

[0059] Furthermore, provided is a bispecific agonistic CD28 antigen binding molecule, wherein the antigen binding domain capable of specific binding to a tumor-associated antigen is an antigen binding domain capable of specific binding to TBPG. In one aspect, provided is a bispecific agonistic CD28 antigen binding molecule as described herein, wherein the antigen binding domain capable of specific binding to TBPG comprises a heavy chain variable region (V_{H}TBPG) comprising (i) CDR-H1 comprising the amino acid sequence of SEQ ID NO:539, (ii) CDR-H2 comprising the amino acid sequence of SEQ ID NO:540, and (iii) CDR-H3 comprising the amino acid sequence of SEQ ID NO:541, and a light chain variable region (V_{L}TBPG) comprising (iv) CDR-L1 comprising the amino acid sequence of SEQ ID NO:542, (v) CDR-L2 comprising the amino acid sequence of SEQ ID NO:543, and (vi) CDR-L3 comprising the amino acid sequence of SEQ ID NO:544. In one aspect, a bispecific agonistic CD28 antigen binding molecule is provided, wherein the antigen binding domain capable of specific binding to TBPG comprises (a) a heavy chain variable region (V_{H}TBPG) comprising an amino acid sequence that is at least about 95%, 96%, 97%, 98%, 99% or 100% identical to the amino acid sequence of SEQ ID NO:545, and a light chain variable region (V_{L}TBPG) comprising an amino acid sequence that is at least about 95%, 96%, 97%, 98%, 99% or 100% identical to the amino acid sequence of SEQ ID NO:546. Particularly, the antigen binding domain capable of specific binding to TBPG comprises heavy chain variable region (V_{H}TBPG) comprising the amino acid sequence of SEQ ID NO:545 and a light chain variable region (V_{L}TBPG) comprising the amino acid sequence of SEQ ID NO:546.

[0060] In a further aspect, the invention provides a bispecific agonistic CD28 antigen binding molecule characterized by monovalent binding to CD28, comprising (a) one antigen binding domain capable of specific binding to CD28, (b) at least one antigen binding domain capable of specific binding to a Multiple Myeloma (MM) cell surface antigen, and (c) an Fc domain composed of a first and a second subunit capable of stable association comprising one or more amino acid substitution that reduces the binding affinity of the antigen binding molecule to an Fc receptor and/or effector function. In one aspect, the Multiple Myeloma (MM) cell surface antigen selected from the group consisting of CD38, BCMA and GPRC5D.

[0061] Thus, provided is a bispecific agonistic CD28 antigen binding molecule, wherein the antigen binding domain capable of specific binding to a tumor-associated antigen is an antigen binding domain capable of specific binding to GPRC5D. In one aspect, provided is a bispecific agonistic CD28 antigen binding molecule as described herein, wherein the antigen binding domain capable of specific binding to GPRC5D comprises (a) a heavy chain variable region (V_{H}GPRC5D) comprising (i) CDR-H1 comprising the amino acid sequence of SEQ ID NO:563, (ii) CDR-H2 comprising the amino acid sequence of SEQ ID NO:564, and (iii) CDR-H3 comprising the amino acid sequence of SEQ ID NO:565, and a light chain variable region (V_{L}GPRC5D) comprising (iv) CDR-L1 comprising the amino acid sequence of SEQ ID NO:566, (v) CDR-L2 comprising the amino acid sequence of SEQ ID NO:567, and (vi) CDR-L3 comprising the amino acid sequence of SEQ ID NO:568, or (b) a heavy chain variable region (V_{H}GPRC5D) comprising (i) CDR-H1 comprising the amino acid sequence of SEQ ID NO:579, (ii) CDR-H2 comprising the amino acid sequence of SEQ ID NO:580, and (iii) CDR-H3 comprising the amino acid sequence of SEQ ID NO:581, and a light chain variable region (V_{L}GPRC5D) comprising (iv) CDR-L1 comprising the amino acid sequence of SEQ ID NO:582, (v) CDR-L2 comprising the amino acid sequence of SEQ ID NO:583, and (vi) CDR-L3 comprising the amino acid sequence of SEQ ID NO:584. In one aspect, a bispecific agonistic CD28 antigen binding molecule is provided, wherein the antigen binding domain capable of specific binding to GPRC5D comprises a heavy chain variable region (V_{H}GPRC5D) comprising an amino acid sequence that is at least about 95%, 96%, 97%, 98%, 99% or 100% identical to the amino acid sequence of SEQ ID NO:569, and a light chain variable region (V_{L}GPRC5D) comprising an amino acid sequence that is at least about 95%, 96%, 97%, 98%, 99% or 100% identical to the amino acid sequence of SEQ ID NO:570. Particularly, the antigen binding domain capable of specific binding to GPRC5D comprises a heavy chain variable region (V_{H}GPRC5D) comprising the amino acid sequence of SEQ ID NO:569 and a light chain variable region (V_{L}GPRC5D) comprising the amino acid sequence of SEQ ID NO:570.

[0062] In one aspect, provided is a bispecific agonistic CD28 antigen binding molecule, wherein the antigen binding domain capable of specific binding to a tumor-associated antigen is an antigen binding domain capable of specific binding to CD38. In one aspect, provided is a bispecific agonistic CD28 antigen binding molecule as described herein, wherein the antigen binding domain capable of specific binding to CD38 comprises a heavy chain variable region (V_{H}CD38) comprising (i) CDR-H1 comprising the amino acid sequence of SEQ ID NO:547, (ii) CDR-H2 comprising the amino acid sequence of SEQ ID NO:548, and (iii) CDR-H3 comprising the amino acid sequence of SEQ ID NO:549, and a light chain variable region (V_{L}CD38) comprising (iv) CDR-L1 comprising the amino acid sequence of SEQ ID NO:550, (v) CDR-L2 comprising the amino acid sequence of SEQ ID NO:551, and (vi) CDR-L3 comprising the amino acid sequence of SEQ ID NO:552. In one aspect, a bispecific agonistic CD28 antigen binding molecule is provided, wherein the antigen binding domain capable of specific binding to CD38 comprises a heavy chain variable region (V_{H}CD38) comprising an amino acid sequence that is at least about 95%, 96%, 97%, 98%, 99% or 100% identical to the amino acid sequence of SEQ ID NO:553, and a light chain variable region (V_{L}CD38) comprising an amino acid sequence that is at least about 95%, 96%, 97%, 98%, 99% or 100% identical to the amino acid sequence of SEQ ID NO:554. Particularly, the antigen binding domain capable of specific binding to CD38 comprises a heavy chain variable region (V_{H}CD38) comprising the amino acid sequence of SEQ ID NO:553 and a light chain variable region (V_{L}CD38) comprising the amino acid sequence of SEQ ID NO:554.

[0063] In one aspect, provided is a bispecific agonistic CD28 antigen binding molecule, wherein the antigen binding domain capable of specific binding to a tumor-associated antigen is an antigen binding domain capable of specific binding to BCMA. In one aspect, provided is a bispecific agonistic CD28 antigen binding molecule as described herein, wherein the antigen binding domain capable of specific binding to BCMA comprises a heavy chain variable region (VHBCMA) comprising (i) CDR-H1 comprising the amino acid sequence of SEQ ID NO:555, (ii) CDR-H2 comprising the amino acid sequence of SEQ ID NO:556, and (iii) CDR-H3 comprising the amino acid sequence of SEQ ID NO:557, and a light chain variable region (V_{L}BCMA) comprising (iv) CDR-L1 comprising the amino acid sequence of SEQ ID NO:558, (v) CDR-L2 comprising the amino acid sequence of SEQ ID NO:559, and (vi) CDR-L3 comprising the amino acid sequence of SEQ ID NO:560. In one aspect, a bispecific agonistic CD28 antigen binding molecule is provided, wherein the antigen binding domain capable of specific binding to BCMA comprises a heavy chain variable region (VHBCMA) comprising an amino acid sequence that is at least about 95%, 96%, 97%, 98%, 99% or 100% identical to the amino acid sequence of SEQ ID NO:559, and a light chain variable region (V_{L}BCMA) comprising an amino acid sequence that is at least about 95%, 96%, 97%, 98%, 99% or 100% identical to the amino acid sequence of SEQ ID NO:560. Particularly, the antigen binding domain capable of specific binding to BCMA comprises a heavy chain variable region (VHBCMA) comprising the amino acid sequence of SEQ ID NO:561 and a light chain variable region (V_{L}BCMA) comprising the amino acid sequence of SEQ ID NO:562.

[0064] In a further aspect, the invention provides a bispecific agonistic CD28 antigen binding molecule characterized by monovalent binding to CD28, comprising (a) one antigen binding domain capable of specific binding to CD28, (b) at least one antigen binding domain capable of specific binding to a B cell surface antigen, and (c) an Fc domain composed of a first and a second subunit capable of stable association comprising one or more amino acid substitution that reduces the binding affinity of the antigen binding molecule to an Fc receptor and/or effector function. In one aspect, the B cell surface antigen selected from the group consisting of CD19, CD79b, CD20, CD22 and CD37.

[0065] Thus, provided is a bispecific agonistic CD28 antigen binding molecule, wherein the antigen binding domain capable of specific binding to a tumor-associated antigen is an antigen binding domain capable of specific binding to CD19. In one aspect, provided is a bispecific agonistic CD28 antigen binding molecule as described herein, wherein the antigen binding domain capable of specific binding to CD19 comprises (a) a heavy chain variable region (V_{H}CD19) comprising (i) CDR-H1 comprising the amino acid sequence of SEQ ID NO:406, (ii) CDR-H2 comprising the amino acid sequence of SEQ ID NO:407, and (iii) CDR-H3 comprising the amino acid sequence of SEQ ID NO:408, and a light chain variable region (V_{L}CD19) comprising (iv) CDR-L1 comprising the amino acid sequence of SEQ ID NO:409, (v) CDR-L2 comprising the amino acid sequence of SEQ ID NO:410, and (vi) CDR-L3 comprising the amino acid sequence of SEQ ID NO:411, or (b) a heavy chain variable region (V_{H}CD19) comprising (i) CDR-H1 comprising the amino acid sequence of SEQ ID NO:414, (ii) CDR-H2 comprising the amino acid sequence of SEQ ID NO:415, and (iii) CDR-H3 comprising the amino acid sequence of SEQ ID NO:416, and a light chain variable region (V_{L}CD19) comprising (iv) CDR-L1 comprising the amino acid sequence of SEQ ID NO:417, (v) CDR-L2 comprising the amino acid sequence of SEQ ID NO:418, and (vi) CDR-L3 comprising the amino acid sequence of SEQ ID NO:419. In one aspect, a bispecific agonistic CD28 antigen binding molecule is provided, wherein the antigen binding domain capable of specific binding to CD19 comprises (a) a heavy chain variable region (V_{H}CD19) comprising an amino acid sequence that is at least about 95%, 98% or 100% identical to the amino acid sequence of SEQ ID NO:412, and a light chain variable region (V_{L}CD19) comprising an amino acid sequence that is at least about 95%, 98% or 100% identical to the amino acid sequence of SEQ ID NO:413, or (b) a heavy chain variable region (V_{H}CD19) comprising an amino acid sequence that is at least about 95%, 98% or 100% identical to the amino acid sequence of SEQ ID NO:420, and a light chain variable region (V_{L}CD19) comprising an amino acid sequence that is at least about 95%, 98% or 100% identical to the amino acid sequence of SEQ ID NO:421. Particularly, the antigen binding domain capable of specific binding to CD19 comprises a heavy chain variable region (V_{H}CD19) comprising an amino acid sequence of SEQ ID NO:412 and a light chain variable region (V_{L}CD19) comprising an amino acid sequence of SEQ ID NO:413.

[0066] In one aspect, provided is a bispecific agonistic CD28 antigen binding molecule, wherein the antigen binding domain capable of specific binding to a tumor-associated antigen is an antigen binding domain capable of specific binding to CD79b. In one aspect, provided is a bispecific agonistic CD28 antigen binding molecule as described herein, wherein the antigen binding domain capable of specific binding to CD79b comprises a heavy chain variable region (V_{H}CD79b) comprising (i) CDR-H1 comprising the amino acid sequence of SEQ ID NO:422, (ii) CDR-H2 comprising the amino acid sequence of SEQ ID NO:423, and (iii) CDR-H3 comprising the amino acid sequence of SEQ ID NO:424, and a light chain variable region (V_{L}CD79b) comprising (iv) CDR-L1 comprising the amino acid sequence of SEQ ID NO:425, (v) CDR-L2 comprising the amino acid sequence of SEQ ID NO:426, and (vi) CDR-L3 comprising the amino acid sequence of SEQ ID NO:427. In one aspect, a bispecific agonistic CD28 antigen binding molecule is provided, wherein the antigen binding domain capable of specific binding to CD79b comprises a heavy chain variable region (V_{H}CD79b) comprising an amino acid sequence that is at least about 95%, 96%, 97%, 98%, 99% or 100% identical to the amino acid sequence of SEQ ID NO:428, and a light chain variable region (V_{L}CD79b) comprising an amino acid sequence that is at least about 95%, 96%, 97%, 98%, 99% or 100% identical to the amino acid sequence of SEQ ID NO:429. Particularly, the antigen binding domain capable of specific binding to CD79b comprises a heavy chain variable region (V_{H}CD79b) comprising the amino acid sequence of SEQ ID NO:428, and a light chain variable region (V_{L}CD79b) comprising the amino acid sequence of SEQ ID NO:429.

[0067] In a further aspect, provided is a bispecific agonistic CD28 antigen binding molecule as defined herein before, wherein the antigen binding domain capable of specific binding to CD28 is a Fab fragment or a crossFab fragment.

[0068] In another aspect, provided is a bispecific agonistic CD28 antigen binding molecule as described herein, comprising

[0069] (a) one Fab fragment capable of specific binding to CD28,

[0070] (b) one crossFab fragment capable of specific binding to a tumor-associated antigen, and

[0071] (c) a Fc domain composed of a first and a second subunit capable of stable association comprising one or more amino acid substitution that reduces the binding affinity of the antigen binding molecule to an Fc receptor and/or effector function.

[0072] In a further aspect, provided is a bispecific agonistic CD28 antigen binding molecule as described herein, comprising

[0073] (a) a first Fab fragment capable of specific binding to CD28,

[0074] (b) a second Fab fragment capable of specific binding to a tumor-associated antigen, and

[0075] (c) a Fc domain composed of a first and a second subunit capable of stable association comprising one or more amino acid substitution that reduces the binding affinity of the antigen binding molecule to an Fc receptor and/or effector function,

[0076] wherein the first Fab fragment capable of specific binding to CD28 is fused at the C-terminus of the Fab heavy chain to the N-terminus of the Fab heavy chain of the second Fab fragment capable of specific binding to a tumor-associated antigen, which is in turn fused at its C-terminus to the N-terminus of one of the Fc domain subunits.

[0077] In another aspect, a bispecific agonistic CD28 antigen binding molecule as disclosed herein is provided, comprising

[0078] (a) a first Fab fragment capable of specific binding to CD28,

[0079] (b) a second and a third Fab fragment capable of specific binding to a tumor-associated antigen, and

[0080] (c) a Fc domain composed of a first and a second subunit capable of stable association comprising one or more amino acid substitution that reduces the binding affinity of the antigen binding molecule to an Fc receptor and/or effector function,

[0081] wherein the first Fab fragment capable of specific binding to CD28 is fused at the C-terminus of the Fab heavy chain to the N-terminus of the Fab heavy chain of the second Fab fragment capable of specific binding to a tumor-associated antigen, which is in turn fused at its C-terminus to the N-terminus of the first Fc domain subunit, and the third Fab fragment capable of specific binding to a tumor-associated antigen is fused at the C-terminus of the Fab heavy chain to the N-terminus of the second Fc domain subunit.

[0082] In a further aspect, provided is a bispecific agonistic CD28 antigen binding molecule as described herein, comprising

[0083] (a) a Fab fragment capable of specific binding to CD28,

[0084] (b) a VH and VL domain capable of specific binding to a tumor-associated antigen, and

[0085] (c) a Fc domain composed of a first and a second subunit capable of stable association comprising one or more amino acid substitution that reduces the binding affinity of the antigen binding molecule to an Fc receptor and/or effector function,

wherein the Fab fragment capable of specific binding to CD28 is fused at its C-terminus to the N-terminus of the first Fc domain subunit, and wherein one of the VH and VL domain capable of specific binding to a tumor-associated antigen is fused via a peptide linker to the C-terminus of the first Fc domain subunit and the other one of the VH and VL domain capable of specific binding to a tumor-associated antigen is fused via a peptide linker to the C-terminus of the second Fc domain subunit.

[0086] According to another aspect of the invention, there is provided one or more isolated polynucleotide(s) encoding the bispecific agonistic CD28 antigen binding molecule of the invention. The invention further provides one or more vector(s), particularly expression vector(s), comprising the isolated polynucleotide(s) of the invention, and a host cell comprising the isolated polynucleotide(s) or the expression vector(s) of the invention. In some aspects, the host cell is a eukaryotic cell, particularly a mammalian cell. In another aspect, provided is a method of producing a bispecific agonistic CD28 antigen binding molecule as described herein comprising culturing the host cell of the invention under conditions suitable for the expression of the bispecific agonistic CD28 antigen binding molecule. Optionally, the method also comprises recovering the bispecific agonistic CD28 antigen binding molecule. The invention also encompasses a bispecific agonistic CD28 antigen binding molecule produced by the method of the invention.

[0087] The invention further provides a pharmaceutical composition comprising a bispecific agonistic CD28 antigen binding molecule of the invention and at least one pharmaceutically acceptable excipient. In one aspect, the pharmaceutical composition is for use in the treatment of cancer.

[0088] Also encompassed by the invention are methods of using the bispecific agonistic CD28 antigen binding molecule and the pharmaceutical composition of the invention. In one aspect the invention provides a bispecific agonistic CD28 antigen binding molecule or a pharmaceutical composition according to the invention for use as a medicament. In one aspect, provided is a bispecific agonistic CD28 antigen binding molecule as described herein for use in (a) enhancing cell activation or (b) enhancing T cell effector functions. In one aspect, provided is a bispecific agonistic CD28 antigen binding molecule or a pharmaceutical composition according to the invention for use in the treatment of a disease. In a specific aspect, the disease is cancer. In another aspect is provided a bispecific agonistic CD28 antigen binding molecule or pharmaceutical composition according to the invention is for use in the treatment of cancer, wherein the bispecific agonistic CD28 antigen binding molecule is administered in combination with a chemotherapeutic agent, radiation therapy and/or other agents for use in cancer immunotherapy. In a further aspect, provided is a bispecific agonistic CD28 antigen binding molecule or a pharmaceutical composition for use in the treatment of cancer, wherein the bispecific agonistic CD28 antigen binding molecule is administered in combination with a T-cell activating anti-CD3 bispecific antibody. In yet another aspect, provided is a bispecific agonistic CD28 antigen binding molecule or a pharmaceutical composition for use in the treatment of cancer, wherein the bispecific agonistic CD28 antigen binding molecule is administered in combination with an anti-PD-L1 antibody or an anti-PD-1 antibody.

[0089] Also provided is the use of a bispecific agonistic CD28 antigen binding molecule according to the invention in the manufacture of a medicament for the treatment of a disease; as well as a method of treating a disease in an individual, comprising administering to said individual a therapeutically effective amount of a bispecific agonistic CD28 antigen binding molecule according to the invention or a composition comprising the bispecific agonistic CD28 antigen binding molecule according to the invention in a pharmaceutically acceptable form. In a specific aspect, the disease is cancer. In one aspect, provided is a method (a) enhancing cell activation or (b) enhancing T cell effector functions in an individual, comprising administering a bispecific agonistic CD28 antigen binding molecule according to the invention or a composition comprising the bispecific agonistic CD28 antigen binding molecule according to the invention in a pharmaceutically acceptable form to said individual. In another aspect, provided is the use of a bispecific agonistic CD28 antigen binding molecule according to the invention in the manufacture of a medicament for the treatment of a disease, wherein the treatment comprises co-administration with a chemotherapeutic agent, radiation therapy and/or other agents for use in cancer immunotherapy. In a further aspect, provided is a method of treating a disease in an individual, comprising administering to said individual a therapeutically effective amount of a bispecific agonistic CD28 antigen binding molecule according to the invention or a composition comprising the bispecific agonistic CD28 antigen binding molecule according to the invention in a pharmaceutically acceptable form, wherein the method comprises co-administration with a chemotherapeutic agent, radiation therapy and/or other agents for use in cancer immunotherapy.

[0090] In a further aspect, provided is a method of treating a disease in an individual, comprising administering to said individual a therapeutically effective amount of a bispecific agonistic CD28 antigen binding molecule according to the invention or a composition comprising the bispecific agonistic CD28 antigen binding molecule according to the invention in a pharmaceutically acceptable form, wherein the method comprises co-administration of a T-cell activating anti-CD3 bispecific antibody. In another aspect, provided is a method of treating a disease in an individual, comprising administering to said individual a therapeutically effective amount of a bispecific agonistic CD28 antigen binding molecule according to the invention or a composition comprising the bispecific agonistic CD28 antigen binding molecule according to the invention in a pharmaceutically acceptable form, wherein the method comprises co-administration of an anti-PD-L1 antibody or an anti-PD-1 antibody. Also provided is a method of inhibiting the growth of tumor cells in an individual comprising administering to the individual an effective amount of the bispecific agonistic CD28 antigen binding molecule according to the invention, or or a composition comprising the bispecific agonistic CD28 antigen binding molecule according to the invention in a pharmaceutically acceptable form, to inhibit the growth of the tumor cells. In any of the above aspects, the individual preferably is a mammal, particularly a human.

### BRIEF DESCRIPTION OF THE DRAWINGS

[0091] In FIGS. 1A to 1L schematic illustrations of the molecules as described are shown.

[0092] FIG. 1A shows the CD28 agonistic antibody CD28(SA) in its huIgG4 isoform (TGN1412).

[0093] FIG. 1B illustrates the CD28(SA) agonistic antibody as hu IgG1 PGLALA isotype (“Fc silent”).

[0094] Bispecific FAP-CD28 antigen binding molecules in 1+1 format, 1+2 format, 2+2 format and 1+4 format are shown in FIGS. 1C, 1D, 1E and 1F, respectively.

[0095] Bispecific CEA-CD28 antigen binding molecules in 1+2 format, 2+2 format and 1+1 format are shown in FIGS. 1G, 1H and 1J, respectively.

[0096] FIG. 1I shows a schematic illustration of the CD28 agonistic antibody variants as monovalent hu IgG1 PGLALA isotype (“Fc silent”).

[0097] FIG. 1K shows a bispecific FAP-CD28 antigen binding molecule in 1+1 format, wherein the FAP antigen binding domain is represented as VH and VL domains each fused to one C-terminus of the Fc domain subunits.

[0098] FIG. 1L illustrates a bispecific FAP-CD28 antigen binding molecule in 2+1 format, wherein the CD28 antigen binding domain is represented as crossFab that is fused at its C-terminus to the N-terminus of one of the heavy chains of the “bivalent” FAP antibody.

[0099] FIG. 1M shows another bispecific FAP-CD28 antigen binding molecule in 1+1 format, wherein the CD28 antigen binding domain is represented as crossFab that is fused at its C-terminus to the N-terminus of the Fab fragment binding to FAP.

[0100] FIG. 1N illustrates a trispecific FAP-CEA-CD28 antigen binding molecule in 1+1+1 format, wherein the CD28 antigen binding domain is represented as Fab that is fused at the C-terminus of both the light and the heavy chain to the N-terminus of both the light and heavy chain of the anti-FAP antigen binding domain on the huIgG1 PG-LALA Fc knob chain and wherein the anti-CEA CrossFab fragment is part of the huIgG1 PG-LALA Fc hole chain.

[0101] FIGS. 2A, 2B, 2C, 2D and 2E relate to the binding of CD28 agonistic antibodies and FAP-CD28 antigen binding molecules to human CD28 or human FAP on cells. Shown is the binding of CD28(SA) in it IgG4 isoform vs. hu IgG1 PGLALA isotype ti human CD28 in FIG. 2A and the binding of different FAP-CD28 molecules to human CD28 (FIG. 2B) and human FAP (FIG. 2C) on cells. Median fluorescence intensities of binding of different CD28 agonistic antibodies or anti-DP47 targeted molecules to CHO cells expressing human CD28 (parental cell line CHO-k1 ATCC # CCL-61, modified to stably overexpress human CD28) or 3T3 cells expressing human FAP (NIH/3T3 cell line (ATCC CRL-1658)) was assessed by flow cytometry. Depicted are technical triplicates with SEM. A comparison of FAP(4B9)-CD28(SA) antigen binding molecules (Molecules D, E and F as described in Example 1) is shown in FIG. 2D (binding to human CD28) and FIG. 2E (binding to human FAP).

[0102] FIGS. 2F and 2G show the binding of different formats of FAP-CD28 antigen binding molecules with monovalent binding to CD28 and FAP, respectively. Shown are the curves for FAP-CD28 CTF 1+1 (P1AE2236, Molecule I), FAP-CD28 1+1 (P1AD4492, Molecule C), FAP-CD28 H2T 1+1 (P1AE2021, Molecule H), and the two compounds FAP-CD28(SA) 1+2 (P1AD9011, Molecule E) and DP47 as reference. Shown are median fluorescence intensities of binding of the FAP-CD28 antibodies or anti-DP47 antibody (negative control) to CHO cells expressing human CD28 (parental cell line CHO-k1 ATCC # CCL-61, modified to stably overexpress human CD28) (FIG. 2F) or 3T3 cells expressing human FAP (NIH/3T3 cell line (ATCC CRL-1658)) (FIG. 2G), assessed by flow cytometry. Shown are technical triplicates with SEM. FIGS. 2H and 21 show the binding of FAP-CD28 2+1 (P1AE5231, Molecule G) to CD28 and FAP, respectively.

[0103] The alignment of the variable domains of CD28(SA) and variants thereof is shown in FIGS. 3A to 3D. Alignment of the CD28(SA) VH domain and variants thereof in order to remove cysteine 50 and to reduce the affinity of the resulting anti-CD28 binders to different degrees is shown in FIGS. 3A and 3B. Of note, in VH variants i and j, the CDRs of CD28(SA) were grafted from an IGHV1-2 framework into an IGHV3-23 framework (FIG. 3B). In FIGS. 3C and 3D, alignment of the CD28(SA) VL domain and variants thereof in order to reduce the affinity of the resulting anti-CD28 binders to different degrees is shown. In variant t, the CDRs were grafted into the framework sequence of the trastuzumab (Herceptin) VL sequence.

[0104] In FIGS. 4A to 4C the binding of affinity-reduced CD28 agonistic antibody variants in monospecific, monovalent IgG formats from supernatants to human CD28 on cells is shown. Median fluorescence intensities of binding to CHO cells expressing human CD28 (parental cell line CHO-k1 ATCC # CCL-61, modified to stably overexpress human CD28) compared to the negative control (anti-DP47) and the original TGN1412, were assessed by flow cytometry. The binding curves of variants 1-10 are shown in FIG. 4A, those of variants 11 to 22 in FIG. 4B and those of variants 23 to 31 in FIG. 4C. Depicted are technical duplicates with SD.

[0105] In FIGS. 4D and 4E, the binding of FAP-targeted bispecific CD28 agonistic antibody variants in huIgG1 PG-LALA 1+1 format with selected affinity-reduced CD28 agonistic antibody variants to human CD28 on cells is shown. The binding curves of bispecific 1+1 constructs with variants 8, 11, 12, 15, 16 and 17 are shown in FIG. 4D, whereas the binding curves of bispecific 1+1 constructs with variants 19, 23, 25, 27 and 29 are shown in FIG. 4E. Selected binders were chosen based on affinities for production in a 1+1, bispecific FAP-targeted format. In FIGS. 4F and 4G, the binding of the same FAP-targeted bispecific CD28 agonistic antibody variants in huIgG1 PG-LALA 1+1 format to human FAP is shown. Provided are median fluorescence intensities of binding to CHO cells expressing human CD28 (parental cell line CHO-k1 ATCC # CCL-61, modified to stably overexpress human CD28) or to 3T3 cells expressing human FAP (NIH/3T3 cell line (ATCC CRL-1658)) compared to the negative control (anti-DP47) and to TGN1412 (Molecule A), assessed by flow cytometry. Shown are technical triplicates with SEM.

[0106] The in vitro potency of selected FAP-targeted bispecific CD28 agonistic antibody variants in huIgG1 PG-LALA 1+1 format is illustrated in FIGS. 4H, 4I and 4J. PBMC T cells were incubated with MCSP- and FAP-expressing MV3 melanoma cells for 5 days in the presence of limiting concentration of MCSP-TCB (5 pM, P1AD2189) and increasing concentration of FAP-CD28 constructs with the indicated CD28 variant binders. In FIG. 4H is shown the CFSE-dilution as measure for T cell proliferation of CD8 T cells, assessed by flow cytometry. Error bars show SEM, graphs depict technical triplicates of representative results from 2 donors. In FIG. 4I is shown the correlation of K_{D} (nM) of the CD28 binder variant in relation to potency by area under the curve of (a) as % of the parental TGN1412 clone (CD28(SA)). In FIG. 4J the target cell killing at 90h is shown.

[0107] FIGS. 5A to 5D refer to the establishment of high-density (HD) pre-culture and mode of action of CD28(SA). PBMC T cells were either pre-cultured at high density (HD) for 2 days or used fresh from PBMC isolation and stimulated with increasing concentrations of CD28(SA). Depicted is CFSE-dilution as proxy for T cell proliferation after 5 days of stimulation with CD28(SA) (Molecule A, P1AE1975) (FIG. 5A) and cytokine secretion after 2 days (FIG. 5B) of stimulation. FIG. 5C shows the percentage of FcγRIIb expression in PBMC monocytes and B cells before and after 2 days HD PBMC pre-culture, assessed by flow cytometry. FIG. 5D: HD pre-cultured PBMCs were co-cultured with CD28(SA) for 5 days in presence or absence of an FcγRIIb blocking antibody or isotype control and percentage of CFSE-dilution of CD4 T cells was assessed by flow cytometry. Graphs are representative of at least 6 donors (FIG. 5A, 5B) and 2 donors (FIG. 5C, 5D), each assessed in independent experiments. The graphs show technical triplicates. Error bars indicate SEM. Statistical analysis was performed by student's t-test. ***: p<0.001. Superagonism of CD28(SA) IgG4 depends on cross-linking to FcγRIIb.

[0108] In FIGS. 6A and 6B the T cell proliferation, i.e. CFSE-dilution of CD4 T cells after 5 days of stimulation with either original Fc wild-type IgG4 CD28(SA) (P1AE1975) or CD28(SA) bearing the P329G-LALA mutation (P1AD9289) is shown. T cells were pre-cultured at high density for 2 days. Graphs are representative of at least 3 independent experiments. Technical triplicates are shown. Fc-silencing abolishes superagonism in TGN1412. Adding a tumor-targeting moiety to Fc-silenced TGN1412 restores superagonism, which is then dependent on the presence of the tumor-target.

[0109] In FIGS. 7A, 7B, 7C and 7D a comparison of FAP-targeted CD28 agonists in different formats (2+2 and 1+2) and with superagonistic (CD28(SA)) binders and conventional agonistic binders (9.3, CD28(CA)) is shown. FAP-targeted CD28 agonists with conventional CD28 agonistic binders do not function as superagonists. PBMC T cells were co-cultured with 3T3-huFAP cells (FAP present) in the presence of increasing concentrations of the FAP-CD28 formats with superagonistic binders (SA, FIG. 7A) or conventional agonistic binders (9.3, FIG. 7B) for 5 days. T cell proliferation is shown. PBMC T cells were then also co-cultured with 3T3 WT cells (FAP absent), in the presence of increasing concentrations of the FAP-CD28 formats with superagonistic binders (SA, FIG. 7C) or conventional agonistic binders (9.3, FIG. 7D) for 5 days. Depicted is CFSE-dilution as measure for T cell proliferation of CD8 T cells, assessed by flow cytometry on day 5 post stimulation. Graphs show cumulative data from 3 donors in 3 independent experiments. Error bars show SEM. In the same experimental setup also cytokines were measured from supernatants after 2 days of co-culture. The values are provided in FIG. 7E.

[0110] The ability of FAP-CD28 in various formats with either superagonistic CD28(SA) binders or conventional agonistic binders (CD28(CA)) to induce killing of FAP-expressing RFP-MV3 melanoma cells was assessed over the course of 90h by live cell imaging using the IncuCyte technology. All molecules including the FAP-TCB (P1AD4645) were used at 10 nM. FIGS. 8A, 8B and 8C show representative results from three donors with technical triplicates, respectively. FIG. 8D shows the cumulative results expressed as area under the curve (AUC) at t=90h of 3 donors from 3 independent experiments. Boxes display 25th-75th percentiles, whiskers display min to max. Statistical analysis was performed by paired 1-way ANOVA. ***: p<0.001, ns: not significant.

[0111] A comparison of CEA-targeted CD28 agonists in different formats with superagonistic and conventional agonistic binders is shown in FIGS. 9A and 9B. The ability of CEA-CD28 in various formats with either superagonistic CD28(SA) binders or conventional agonistic binders (CD28(CA)) to induce killing of CEA-expressing RFP⁺ MKN45 gastric cancer cells was assessed over the course of 90h by live cell imaging using the IncuCyte technology. All molecules including the CEACAM5-TCB (P1AD5299) were used at 10 nM. FIG. 9A shows representative results from one donor with technical triplicates. FIG. 9B shows the statistical analysis of technical triplicates expressed as area under the curve (AUC) at t=90h of 1 donor in 1 experiment. Boxes display 25th-75th percentiles, whiskers display min to max. Statistical analysis was performed by paired 1-way ANOVA. ***: p<0.001. It is shown that CEA-targeted CD28 agonists with conventional CD28 agonistic binders do not behave superagonistically.

[0112] In FIGS. 10A, 10B and 10C it is shown that targeted CD28 agonists with monovalent superagonistic binders are not functionally superagonistic. PBMC T cells were co-cultured for 5 days with 3T3-huFAP cells in presence of increasing concentrations of FAP-CD28 with bivalent CD28 binders (P1AD9011, closed circles) or FAP-CD28 with monovalency for CD28 binding (P1AD4492, open circles). In FIG. 10A CFSE-dilution of CD8 T cells is shown. Furthermore, activation of T cells was assessed by detection of activation markers CD69 (FIG. 10B) and CD25 (FIG. 10C) by flow cytometry. Mean fluorescent intensity (MFI) of CD69 and CD25 stainings are shown at 5 days post stimulation. Technical triplicates from 1 donor are shown, error bars indicate SEM. It is shown that TGN1412-like superagonism requires multivalent CD28 binding.

[0113] FIGS. 11A and 11B show that if combined with T cell bispecific antibodies (TCBs) TCB-mediated effector functions are supported by monovalent and bivalent CD28 binding of FAP-targeted agonistic CD28 antigen binding molecules with comparable potency, but CD28 binder monovalency is required to maintain tumor target dependence of CD28 agonists in the presence of TCBs. In FIG. 11A, for the presence of FAP, PBMC T cells were incubated with MCSP- and FAP-expressing MV3 melanoma cells for 90h in the presence of a combined limiting concentration of MCSP-TCB (5 pM, P1AD2189) and increasing concentration (range 0-10 nM) of FAP-CD28(SA) with bivalent or monovalent binding to CD28, respectively. Depicted is target cell killing at 90h as assessed by live cell imaging using the IncuCyte technology. In FIG. 11B, PBMC T cells were co-cultured for 90h with FAP-negative CEA-expressing MKN45 gastric cancer cells (FAP absent) in the presence of limiting concentrations of CEACAM5-TCB (10 pM, P1AD5299) in combination and increasing concentration (range 0-10 nM) of FAP-CD28 with bivalent or monovalent CD28 binding, respectively. Depicted is target cell killing at 90h as assessed by IncuCyte. Data show killing of MKN45 target cells over time, from 1 donor in 1 experiment, technical triplicates, error bars indicate SEM.

[0114] In FIGS. 12A and 12B it is shown that FAP-CD28(SA) with bivalent binding to CD28 loses FAP-dependence when combined with T cell bispecifics. In FIG. 12A no TCB is present. PBMC T cells were either co-cultured with CEA-expressing MKN45 and 3T3-huFAP (“FAP present” condition, closed circles) or 3T3-WT (“FAP absent” condition, open circles), respectively, in the presence of increasing concentrations of FAP-CD28(SA) 2+1. The combination with TCB is shown in FIG. 12B. PBMC T cells were either co-cultured with CEA-expressing MKN45 and 3T3-huFAP (“FAP present” condition, closed circles) or 3T3-WT (“FAP absent” condition, open circles), respectively, in the presence of limiting concentrations of CEACAM5-TCB (10 pM, P1AD5299) and increasing concentrations of FAP-CD28 2+1 SA. Shown is CD8 T cell proliferation after 5 days of stimulation. Data are representative of 2 independent experiments with 2 donors. Results from one donor are shown, data points represent technical triplicates, error bars indicate SEM.

[0115] FIGS. 13A, 13B and 13C show the functionality of FAP-CD28(SA) antigen binding molecules with monovalent binding to CD28 in different formats. Molecule C is a FAP-CD28(SA) classical 1+1 format (P1AD4492), Molecule H is a FAP-CD28(SA) 1+1 “head-to-tail” (H2T) format (P1AE2021), Molecule I is a FAP-CD28(SA) 1+1 format with C-terminal fusion of the FAP binder (P1AE2236) and Molecule G is a FAP-CD28(SA) 2+1 format (P1AD5231). As reference the bivalent CD28 antigen binding molecule (P1AD9011) was used. PBMC T cells were incubated with MCSP- and FAP-expressing MV3 melanoma cells in the presence of limiting concentration of MCSP-TCB (5 pM, P1AD2189) and increasing concentration (range 0-10 nM) of FAP-CD28 in the given formats. Depicted is CFSE-dilution as measure for T cell proliferation of CD8 (FIG. 13A) and CD4 T cells (FIG. 13B) after 5 days, assessed by flow cytometry. FIG. 13C: Shown is killing of MV3 cells over 84 hours in presence of 5 pM MCSP-TCB alone compared to combination of 5 pM MCSP-TCB and increasing concentrations of FAP-CD28 in the various formats. Killing was assessed by live cell imaging using the IncuCyte system. All molecules were able to support TCB-mediated effector functions. Graphs depict cumulative data from 3 independent experiments and 4 donors 10 pM MCSP-TCB; E:T 20; Statistics: 2-way ANOVA. Stars indicate lowest concentration at which add-on is significant over TCB alone: *p<0.05, **p<0.01; ***p<0.001. Error bars indicate SEM.

[0116] Target cell killing of CEA-CD28 1+1 format in combination with TCB is shown in FIG. 14. PBMC T cells were co-cultured for 90h with CEA-expressing MKN45 gastric cancer cells in presence of limiting concentrations of CEACAM5-TCB (10 pM, P1AD5299) in combination with 2 nM of CEA-CD28 (P1AE3127) or untargeted CD28 (P1AD8944). Data show killing of MKN45 target cells over time, from 1 donor in 1 experiment. Killing was assessed by live cell imaging using the IncuCyte system. It is shown that only the combination leads to target cell killing, at the given concentration the molecules alone do not induce killing. CEA-CD28 synergizes with CEACAM5-TCB.

[0117] In FIG. 15 it is shown that CEA-CD28 enhances CEA-TCB and CEACAM5-TCB and lowers the threshold of CEA-expression for TCBs to induce T cell activation. PBMC T cells were incubated with increasing concentrations of either CEA-TCB (P1AD4646) or CEACAM5-TCB (P1AD5299) and fixed concentrations of CEA-CD28 (P1AE3127) in presence of target cell lines with different CEA expression levels: (i) MKN45 (high expression, approx. 400 000 CEA binding sites/cell), (ii) Lovo (medium expression, approx. 60 000 CEA binding sites/cell), (iii) HT-29 (low expression, approx. 6 000 CEA binding sites/cell). T cell proliferation was assessed as proxy of T cell activation by flow cytometry.

[0118] The binding of selected affinity reduced CD28 binder variants in a bispecific CEA-targeted monovalent 1+1 format to CD28 on cells is shown in FIG. 16. Median fluorescence intensities of binding of the CEA-CD28 antibodies or anti-DP47 antibody (negative control) to CHO cells expressing human CD28 (parental cell line CHO-k1 ATCC # CCL-61, modified to stably overexpress human CD28) was assessed by flow cytometry. Shown are technical triplicates with SEM.

[0119] FIGS. 17A, 17B and 17C show the functionality of selected affinity reduced CD28 binder variants in a bispecific CEA-targeted monovalent 1+1 format. PBMC T cells were co-cultured with CEA-expressing MKN45 gastric cancer cells in presence of limiting concentrations of CEACAM5-TCB (10 pM, P1AD5299) in combination with 2 nM of the CEA-CD28 1+1 molecules with the CD28 binder variants. CD8 T cell proliferation (FIG. 17A) and CD4 T cell proliferation (FIG. 17B) was assessed by CFSE-dilution by flow cytometry after 5 days of co-culture. Target cell killing was assessed after 90h of incubation (FIG. 17C). Data show killing of MKN45 target cells over time, from 1 donor in 1 experiment. All molecules are able to support CEACAM5-TCB mediated effector functions.

[0120] FIG. 18 shows the binding of humanized CEA(A5B7) huIgG1 P329G LALA variants to MKN-45 as compared to the binding of the parental murine A5B7 antibody. Antibodies were detected with a fluorescently labeled secondary antibody and fluorescence was measured by flow cytometry.

[0121] FIGS. 19A to 19C are schematic illustrations of the recombinant proteins displaying different domains of the CEACAM5 protein that were used as antigens in the phage display campaign. FIG. 19A shows construct NABA-avi-His consisting of the 4 Ig-like domains N, A1, B and A2. FIG. 19B shows the construct N(A2B2)A-avi-His and FIG. 19C illustrates the construct NA(B2)A-avi-His.

[0122] FIGS. 20A and 20B show the VH and VL sequences, respectively, of humanized CEA antibody A5H1EL1D wherein the randomized positions are marked with X.

[0123] Schematic drawings of the phage vectors of the affinity maturation libraries are shown in FIG. 21A (CDRH1/H2 affinity maturation library), FIG. 21B (CDRL1/H2 affinity maturation library) and FIG. 21C (CDRH3/CDRL3 amplification library).

[0124] FIGS. 22A and 22B show an alignment of the VH amino acid sequences (FIG. 22A) and VL amino acid sequences (FIG. 22B) of the affinity-matured, humanized CEA(A5H1EL1D) antibody variants.

[0125] In FIGS. 23A to 23D schematic illustrations of bispecific CEA/CD28 antigen binding molecules as described in Example 11 are shown.

[0126] FIG. 23A shows a bispecific CEA-CD28 antigen binding molecule in 1+1 format, wherein the CEA antigen binding domain is represented as crossFab (VH/VL exchange) and in the Fab fragment bearing the CD28 antigen binding domain there are charged modifications in order to support the correct pairing of the light chains. The Fc domain has knob into hole modifications and the P329G LALA mutations to abrogate the binding to Fcγ receptors. In FIG. 23B the CD28 antigen binding domain is represented as crossFab (VH/VL exchange) and the Fab fragment bearing the CEA antigen binding domain comprises the charged modifications.

[0127] FIG. 23C illustrates a bispecific CEA-CD28 antigen binding molecule in 2+1 format, wherein the CD28 antigen binding domain is represented as crossFab and two Fab fragments with CEA antigen binding domains are fused to each other via the heavy chain (head-to tail).

[0128] FIG. 23D illustrates a bispecific CEA-CD28 antigen binding molecule in 2+1 format, wherein the CD28 antigen binding domain is represented as crossFab that is fused at its C-terminus to the N-terminus of one of the heavy chains of the “bivalent” CEA antibody (“classical” format).

[0129] In FIG. 24 it is shown that affinity-matured anti-CEA clone P002.139 shows improved binding to CEACAM5 on CEA-expressing MV3 cells. Shown is binding of CEA-CD28 bispecific antibodies carrying either the affinity-matured anti-CEA clone P002.139 or the parental A5H1EL1D clone. Median fluorescence intensities of binding of the CEA-CD28 bispecific antibodies or anti-DP47 antibody (negative control) to MV3 cells genetically engineered to express human CEACAM5 was assessed by flow cytometry. Shown are technical duplicates with SEM. Graph is representative of 3 independent experiments.

[0130] In FIGS. 25A and 25B it is shown that affinity-matured anti-CEA clone P002.139 shows improved functionality in an IL-2 reporter assay. Shown is luminescence readout after 6h of co-incubation of MKN45 cells, IL-2 reporter cells with 5 nM CEA-TCB and CEA-CD28 carrying either the affinity-matured clone P002.139 or the parental clone A5H1EL1D. FIG. 25A shows dose response. Dotted line indicates luminescence achieved by CEA-TCB alone. In FIG. 25B the Area under the curve values calculated from data depicted in FIG. 25A are shown. Provided are technical duplicates with SEM. Graph is representative of 3 independent experiments.

[0131] FIG. 26 shows the study design of an efficacy study with bispecific CEA-CD28 antibodies (comparison of different CEA clones) in combination with CEA TCB in MKN45 Xenograft in humanized mice. Shown is the design and the different treatment groups.

[0132] FIGS. 27A to 27E show results of the efficacy study with CEA-CD28 and CEA TCB combination in MKN45 Xenograft in humanized mice. Shown is the average tumor volume (FIG. 27A) or the growth of tumors in individual mice for the four treatment groups as plotted on the y-axis (FIG. 27B to 27E). FIG. 27B shows the tumor growth for each individual mouse in the vehicle group, FIG. 27C of the mice treated with CEA TCB alone, FIG. 27D of mice treated with CEA TCB and CEA(T84.66)-CD28 (SA_Variant 15) and FIG. 27E of mice treated with CEA TCB and CEA(A5H1EL1D)-CD28 (SA_Variant 15). It can be seen that there is increased TCB-mediated tumor regression in the presence of both bispecific CEA-CD28 antibodies.

[0133] FIG. 28 shows the study design of an efficacy study with bispecific CEA-CD28 antibodies (comparison of different CD28 clones) in combination with CEACAM5 TCB in BXPC3 Xenograft in humanized mice. Shown is the design and the different treatment groups.

[0134] FIG. 29 shows the tumor growth kinetics (Mean, +SEM) for all treatment groups, the corresponding TGI values of each treatment arm are shown in Table 33 (Example 13.2).

[0135] The ex vivo Immuno-PD data are shown in FIGS. 30A to 30D. FIG. 30A shows representative dot plots (CD3 against CD45 and CD4 against CD8) of the stained tumor single cell suspensions of each treatment arm. The summary of CD3, CD8 and CD4 T cell infiltration is depicted in FIG. 30B (CD3), FIG. 30C (CD8) and FIG. 30D (CD4), respectively.

[0136] FIG. 31 shows the study design of an efficacy study with bispecific CEA-CD28 antibody (CEA(A5H1EL1D)-CD28 (SA_Variant 8)) in combination with CEA TCB in MKN45 Xenograft in humanized mice. Shown is the design and the different treatment groups.

[0137] FIG. 32 shows the tumor growth kinetics (Mean, +SEM) for all treatment groups, the corresponding TGI values of each treatment arm are shown in Table 35 (Example 13.3).

[0138] The ex vivo Immuno-PD data are shown in FIGS. 33A and 33B. FIG. 33A shows representative dot plots of the stained tumor single cell suspensions of each treatment arm. The summary of CD3+ T cell infiltration is depicted in FIG. 33B.

[0139] In FIGS. 34A to 34D schematic illustrations of bispecific CD28 antigen binding molecules as described in Example 14 are shown.

[0140] FIG. 34A shows a bispecific EpCAM-CD28 antigen binding molecule in 1+1 format, wherein the CD28 antigen binding domain is represented as crossFab (VH/VL exchange) and in the Fab fragment bearing the EpCAM antigen binding domain there are charged modifications in order to support the correct pairing of the light chains. The Fc domain has knob into hole modifications and the P329G LALA mutations to abrogate the binding to Fcγ receptors.

[0141] In FIG. 34B the Fab bearing the CD28 antigen binding domain comprises charged modifications and the Fab bearing the HER3 antigen binding domain is represented as crossFab (VH/VL exchange).

[0142] FIG. 34C illustrates a bispecific CD30-CD28 antigen binding molecule in 1+1 format, wherein Fab molecule bearing the CD28 antigen binding domain comprises charged modifications and the Fab bearing the CD30 antigen binding domain is represented as crossFab (VH/VL exchange).

[0143] FIG. 34D illustrates a bispecific TPBG-CD28 antigen binding molecule in 1+1 format, wherein Fab molecule bearing the CD28 antigen binding domain comprises charged modifications and the Fab bearing the TPBG (5T4) antigen binding domain is represented as crossFab (VH/VL exchange).

[0144] FIGS. 35A to 35C relate to the functional characterization of EpCAM-CD28 bispecific antigen binding molecules. In FIG. 35A it is shown that EpCAM-CD28 (Molecule 14A) binds to human CD28 on CHO-k1 cells expressing CD28, assessed by flow cytometry. The binding to EpCAM on HT29 cells, assessed by flow cytometry, is shown in FIG. 35B. Anti-DP47 served as negative control for unspecific binding of antibody compounds to cells. Dots represent means of technical duplicates. In FIG. 35C it is shown that EpCAM-CD28 (P1AE9051) enhances T cell responses to anti-CD3 stimulus in the IL-2 reporter assay. Shown is IL-2 reporter cell activation measured by luminescence readout after 6 hours of co-incubation with HT-29 in presence of suboptimal concentrations of anti-CD3 IgG (10 nM) and increasing concentrations of EpCAM-CD28. Dots represent means of technical duplicates.

[0145] FIGS. 36A to 36C relate to the functional characterization of HER3-CD28 bispecific antigen binding molecules. In FIG. 36A it is shown that HER3-CD28 (P1AF0151) binds to human CD28 on CHO-k1 cells expressing CD28, assessed by flow cytometry. The binding to of HER3-CD28 to HER3 on T-47D cells, assessed by flow cytometry, is shown in FIG. 36B. Anti-DP47 served as negative control for unspecific binding of antibody compounds to cells. Dots are means of technical duplicates. In FIG. 36C it is shown that HER3-CD28 (P1AF0151) enhances T cell responses to anti-CD3 stimulus in the IL-2 reporter assay. Shown is IL-2 reporter cell activation measured by luminescence readout after 6 hours of co-incubation with T-47D cells in presence of suboptimal concentrations of anti-CD3 IgG clone OKT3 (10 nM) and increasing concentrations of HER3-CD28. Dots represent means of technical duplicates.

[0146] In FIGS. 37A to 37C schematic illustrations of bispecific CD28 antigen binding molecules targeting a Multiple Myeloma (MM) cell surface antigen as described in Example 16 are shown.

[0147] FIG. 37A shows a bispecific GPRC5D-CD28 antigen binding molecule in 1+1 format, wherein the CD28 antigen binding domain is represented as crossFab (VH/VL exchange) and in the Fab fragment bearing the CPRC5D antigen binding domain there are charged modifications in order to support the correct pairing of the light chains. The Fc domain has knob into hole modifications and the P329G LALA mutations to abrogate the binding to Fcγ receptors.

[0148] In FIG. 37B the Fab bearing the CD28 antigen binding domain comprises charged modifications and the Fab bearing the CD38 antigen binding domain is represented as crossFab (VH/VL exchange).

[0149] FIG. 37C illustrates a bispecific BCMA-CD28 antigen binding molecule in 1+1 format, wherein Fab molecule bearing the CD28 antigen binding domain is represented as crossFab (VH/VL exchange) and the Fab bearing the BCMA antigen binding domain comprises charged modifications.

[0150] FIG. 37D illustrates the anti-GPRC5D/anti-CD3 bispecific antibody (GPRC5D TCB) in 2+1 format, wherein the Fab molecules bearing the GPCR5D antigen binding domain comprise charged modifications and the Fab bearing the CD3 antigen binding domain is represented as crossFab (VH/VL exchange).

[0151] FIGS. 38A to 38F relate to the binding of bispecific antigen binding molecules targeting CD28 and a Multiple Myeloma (MM) cell surface antigen to cells (Example 17.1). Shown is the binding of bispecific antigen binding molecules to either human CD28 on CHO huCD28 c145 cells (FIGS. 38A and 38E), to human CD38 on OCI-Ly18 cells (FIG. 38B), human BCMA (B-cell maturation antigen, FIG. 38C) on IM-9 cells and to human GPRC5D on CHO huGPRC5D L2 cells (FIGS. 38D and 38F) expressed on the indicated cell lines. Depicted are relative median fluorescence values (MFI) from duplicates with SD. EC₅₀ values of binding were calculated by GraphPadPrism and are included in Table 38.

[0152] The T-cell activation of bispecific antigen binding molecules targeting CD28 and a Multiple Myeloma (MM) cell surface antigen as assessed in the IL-2 reporter assay is shown in FIGS. 39A to 39F. Shown is the IL2-reporter cell assay after 5 and 22 hours of incubation, as determined by luminescence. IL2-reporter effector and GPRC5D-expressing target cells were incubated at a effector to target ratio (E:T) of 5:1. GPRC5D-TCB was added at a fixed final assay concentration of 1 nM, the indicated MM-targeted CD28 bispecific antigen binding molecules were titrated as indicated. Representative dose-response curves are depicted for CD38-CD28 in FIG. 39A (after 5 hours of incubation) and FIG. 39B (after 22 hours), for BCMA-CD28 in FIG. 39C (after 5 hours) and FIG. 39D (after 22 hours) and for GPRC5D-CD28 in FIG. 39E (after 5 hours) and FIG. 39F (after 22 hours of incubation).

[0153] FIGS. 40A to 40C show the boosting of T-cell mediated lysis of the GPRC5D-expressing MM cell line NCI-H929 in presence of 0.2 nM of the indicated CD28 bispecific molecules CD38-CD28 (FIG. 40A), BCMA-CD28 (FIG. 40B) and GPRC5D-CD28 (FIG. 40C). Lysis was determined after co-incubation of human pan T-cells and MM tumor target cells at a final E:T ratio of 1:1 for 22 hours. Depicted are technical duplicates with SD. EC50 values and area under the curve values of tumor cell lysis were calculated by GraphPadPrism and are depicted in Table 39.

[0154] FIG. 41A shows a schematic illustration of a bispecific CD19-CD28 antigen binding molecule in 1+1 format as described in Example 18, wherein in the Fab comprising the CD19 antigen binding domain the VH and VL domains are exchanged with each other (VH/VL crossfab) and wherein in the Fab comprising the CD28 antigen binding domain certain amino acids in the CH1 and CL domain are exchanged (charge variants) to allow better pairing with the light chain. FIG. 41B shows a corresponding molecule wherein the CD19 antigen binding domain has been replaced by a CD79b antigen binding domain (anti-CD79b crossfab).

[0155] FIG. 42 relates to the determination of kinetic and thermodynamic parameters of CD79b (polatuzumab) in the construct CD79b (huMA79b.v28)-CD28 (v15) 1+1. Soluble recombinant CD79b-His was captured on CM5 chip via an anti-penta-His antibody and bi-specific CD79b (huMA79b.v28)-CD28 (v15) 1+1 was used as an analyte. Smooth lines represent a global fit of the data to a 1:1 interaction mode.

[0156] In FIG. 43A the median fluorescence intensities (MFI) of binding of CD 19-CD28 variant 15 (P1AE9040) to four different B cell lines expressing different levels of CD19 are shown. Binding was assessed by flow cytometry. Shown are technical duplicates with SEM. In FIG. 43B FACS staining for CD19 of the four different B cell lines (MFI) is depicted.

[0157] Binding of CD19-CD28 with varying CD28 affinities to human CD19 and CD28 on cells is shown in FIGS. 44A and 44B. Median fluorescence intensities (MFI) of binding to CHOk1-CD28 cells (FIG. 44A) and of binding to CD19 on Nalm6 B cells (FIG. 44B) are shown. Dots represent technical duplicates with SEM. Corresponding EC₅₀ values are shown in Table 42 (CHOk1-CD28) and Table 43 (Nalm6) of Example 20. Binding was assessed by flow cytometry.

[0158] In FIGS. 45A to 45D it is shown that CD19-CD28v15 enhances CD20-TCB in IL-2 reporter assay in presence of different B cell lines. Shown is IL-2 reporter cell activation measured by luminescence readout (LUM) after 6 hours of co-incubation with different B cell lines in presence of suboptimal concentrations of CD20-TCB and increasing concentrations of CD19-CD28v15. Dots represent technical duplicates with SEM. Suboptimal CD20-TCB concentration differs with target cell lines: 10 nM for Nalm6, 0.05 nM for RCK8, WSU DLCL2 and Z138.

[0159] FIG. 46 illustrates that CD19-CD28 with various CD28 affinities enhances CD20-TCB mediated T cell activation. Shown is IL-2 reporter cell activation measured by luminescence readout (LUM) after 6 hours of co-incubation with Nalm6 B cells in presence of suboptimal concentrations of CD20-TCB (10 nM) and increasing concentrations of CD19-CD28v15. Dots represent technical duplicates with SEM.

[0160] The activation status of PBMC-derived T cells after co-culture with CD20-expressing target cells (Nalm6) (E:T ratio 5:1) and CD19-CD28 in absence or presence of CD20-TCB was assessed. The activity of CD19-CD28 in absence or presence of TCR signals is shown in FIG. 47. Shown is CD69 expression of PBMC-derived CD4 T cells after 48h of co-incubation with Nalm6 cells, increasing concentrations of CD19-CD28v15 in presence or absence of 10 nM CD20-TCB. Dots represent technical triplicates with SEM.

[0161] In FIGS. 48A to 48D it is illustrated that CD19-CD28 alone does not induce cytokine secretion in PBMCs. Shown is cytokine release in whole PBMCs after 48 hours of co-culture with CD19-CD28 molecules in presence or absence of CD20-TCB. Bars represent mean+SEM of technical triplicates. Data are representative of 2 donors. Cytokine secretion was assessed by Bio-Plex Pro Human Cytokine 17-plex Assay. Shown are IFNγ (FIG. 48A), IL-2 (FIG. 48B), IL-10 (FIG. 48C), and TNF (FIG. 48D).

[0162] In FIGS. 49A and 49B, functional data relating to CD79b-CD28 are shown enhances CD20-TCB in IL-2 reporter assay in presence of Z138 B cells. In FIG. 49A, median fluorescence intensities (MFI) of binding to CD79b on Z138 B cells is shown. In FIG. 49B it is shown that CD79b-CD28 enhances CD20-TCB in IL-2 reporter assay in presence of Z138 B cells. Shown is IL-2 reporter cell activation measured by luminescence readout (LUM) after 6 hours of co-incubation with different B cell lines in presence of suboptimal concentrations of CD20-TCB and increasing concentrations of CD79b-CD28. Dots represent technical duplicates with SEM.

[0163] FIG. 50 shows the study design of an efficacy study with bispecific CD19-CD28 antibodies (comparison of two different CD28 clones) in NALM6 Xenograft in humanized mice. Shown is the design and the different treatment groups.

[0164] FIGS. 51A to 51D show results of the efficacy study with CD19-CD28 in NALM6 Xenograft in humanized mice. Shown is the average tumor volume (FIG. 51A) or the growth of tumors in individual mice for the three treatment groups as plotted on the y-axis (FIG. 51B to 51D). FIG. 51B shows the tumor growth for each individual mouse in the vehicle group, FIG. 51C of the mice treated with CD19-CD28 (variant 15) and FIG. 51D of mice treated with CD19-CD28 (variant 8). It can be seen that CD19-CD28 (variant 8) as a single agent induced stronger tumor growth inhibition as compared to CD19-CD28 (variant 15).

### DETAILED DESCRIPTION OF THE INVENTION

### Definitions

[0165] Unless defined otherwise, technical and scientific terms used herein have the same meaning as generally used in the art to which this invention belongs. For purposes of interpreting this specification, the following definitions will apply and whenever appropriate, terms used in the singular will also include the plural and vice versa.

[0166] As used herein, the term “antigen binding molecule” refers in its broadest sense to a molecule that specifically binds an antigenic determinant. Examples of antigen binding molecules are antibodies, multispecific antibodies (e.g., bispecific antibodies), antibody fragments and scaffold antigen binding proteins.

[0167] As used herein, the term “antigen binding domain that binds to a tumor-associated antigen” or “moiety capable of specific binding to a tumor-associated antigen” refers to a polypeptide molecule that specifically binds to an antigenic determinant. In one aspect, the antigen binding domain is able to activate signaling through its target cell antigen. In a particular aspect, the antigen binding domain is able to direct the entity to which it is attached (e.g. the CD28 antibody) to a target site, for example to a specific type of tumor cell or tumor stroma bearing the antigenic determinant. Antigen binding domains capable of specific binding to a target cell antigen include antibodies and fragments thereof as further defined herein. In addition, antigen binding domains capable of specific binding to a target cell antigen include scaffold antigen binding proteins as further defined herein, e.g. binding domains which are based on designed repeat proteins or designed repeat domains (see e.g. WO 2002/020565).

[0168] In relation to an antigen binding molecule, i.e. an antibody or fragment thereof, the term “antigen binding domain that binds to a target cell antigen” refers to the part of the molecule that comprises the area which specifically binds to and is complementary to part or all of an antigen. An antigen binding domain capable of specific antigen binding may be provided, for example, by one or more antibody variable domains (also called antibody variable regions). Particularly, an antigen binding domain capable of specific antigen binding comprises an antibody light chain variable region (VL) and an antibody heavy chain variable region (VH). In another aspect, the “antigen binding domain capable of specific binding to a tumor-associated antigen” can also be a Fab fragment or a crossFab fragment. In another aspect, the “antigen binding domain capable of specific binding to a tumor-associated antigen” can also be a Fab fragment or a crossFab fragment. As used herein, the terms “first”, “second” or “third” with respect to antigen binding domains etc., are used for convenience of distinguishing when there is more than one of each type of moiety. Use of these terms is not intended to confer a specific order or orientation of the moiety unless explicitly so stated.

[0169] As used herein, the term “antigen binding domain that binds to a B cell surface antigen” or “moiety capable of specific binding to a B cell surface antigen” refers to a polypeptide molecule that specifically binds to an antigenic determinant on the B cell surface. In one aspect, the antigen binding domain is able to activate signaling through its target cell antigen. In a particular aspect, the antigen binding domain is able to direct the entity to which it is attached (e.g. the CD28 agonist) to a target site, e.g. on the B cell. Antigen binding domains capable of specific binding to a B cell surface antigen include antibodies and fragments thereof as further defined herein. In addition, antigen binding domains capable of specific binding to a B cell surface antigen include scaffold antigen binding proteins as further defined herein, e.g. binding domains which are based on designed repeat proteins or designed repeat domains (see e.g. WO 2002/020565).

[0170] The term “antigen binding domain that binds to a Multiple Myeloma (MM) cell surface antigen” or “moiety capable of specific binding to a Multiple Myeloma (MM) cell surface antigen” refers to a polypeptide molecule that specifically binds to an antigenic determinant on Multiple Myeloma (MM) cell. In one aspect, the antigen binding domain is able to activate signaling through its target cell antigen. In a particular aspect, the antigen binding domain is able to direct the entity to which it is attached (e.g. the CD28 agonist) to a target site, e.g. on the MM cell. Antigen binding domains capable of specific binding to a Multiple Myeloma (MM) cell surface antigen include antibodies and fragments thereof as further defined herein. In addition, antigen binding domains capable of specific binding to a B cell surface antigen include scaffold antigen binding proteins as further defined herein, e.g. binding domains which are based on designed repeat proteins or designed repeat domains (see e.g. WO 2002/020565).

[0171] The term “antibody” herein is used in the broadest sense and encompasses various antibody structures, including but not limited to monoclonal antibodies, polyclonal antibodies, monospecific and multispecific antibodies (e.g., bispecific antibodies), and antibody fragments so long as they exhibit the desired antigen-binding activity.

[0172] The term “monoclonal antibody” as used herein refers to an antibody obtained from a population of substantially homogeneous antibodies, i.e., the individual antibodies comprising the population are identical and/or bind the same epitope, except for possible variant antibodies, e.g. containing naturally occurring mutations or arising during production of a monoclonal antibody preparation, such variants generally being present in minor amounts. In contrast to polyclonal antibody preparations, which typically include different antibodies directed against different determinants (epitopes), each monoclonal antibody of a monoclonal antibody preparation is directed against a single determinant on an antigen.

[0173] The term “monospecific” antibody as used herein denotes an antibody that has one or more binding sites each of which bind to the same epitope of the same antigen. The term “bispecific” means that the antigen binding molecule is able to specifically bind to at least two distinct antigenic determinants. Typically, a bispecific antigen binding molecule comprises two antigen binding sites, each of which is specific for a different antigenic determinant. However, a bispecific antigen binding molecule may also comprise additional antigen binding sites which bind to further antigenic determinants. In certain aspects, the bispecific antigen binding molecule is capable of simultaneously binding two antigenic determinants, particularly two antigenic determinants expressed on two distinct cells or on the same cell. The term “bispecific” in accordance with the present invention thus may also include a trispecific molecule, e.g. a bispecific molecule comprising a CD28 antibody and two antigen binding domains directed to two different target cell antigens.

[0174] The term “valent” as used within the current application denotes the presence of a specified number of binding sites specific for one distinct antigenic determinant in an antigen binding molecule that are specific for one distinct antigenic determinant. As such, the terms “bivalent”, “tetravalent”, and “hexavalent” denote the presence of two binding sites, four binding sites, and six binding sites specific for a certain antigenic determinant, respectively, in an antigen binding molecule. In particular aspects of the invention, the bispecific antigen binding molecules according to the invention can be monovalent for a certain antigenic determinant, meaning that they have only one binding site for said antigenic determinant or they can be bivalent or tetravalent for a certain antigenic determinant, meaning that they have two binding sites or four binding sites, respectively, for said antigenic determinant.

[0175] The terms “full length antibody”, “intact antibody”, and “whole antibody” are used herein interchangeably to refer to an antibody having a structure substantially similar to a native antibody structure. “Native antibodies” refer to naturally occurring immunoglobulin molecules with varying structures. For example, native IgG-class antibodies are heterotetrameric glycoproteins of about 150,000 daltons, composed of two light chains and two heavy chains that are disulfide-bonded. From N- to C-terminus, each heavy chain has a variable region (VH), also called a variable heavy domain or a heavy chain variable domain, followed by three constant domains (CH1, CH2, and CH3), also called a heavy chain constant region. Similarly, from N- to C-terminus, each light chain has a variable region (VL), also called a variable light domain or a light chain variable domain, followed by a light chain constant domain (CL), also called a light chain constant region. The heavy chain of an antibody may be assigned to one of five types, called α (IgA), δ (IgD), ε (IgE), γ (IgG), or μ (IgM), some of which may be further divided into subtypes, e.g. γ1 (IgG1), γ2 (IgG2), γ3 (IgG3), γ4 (IgG4), α1 (IgA1) and α2 (IgA2). The light chain of an antibody may be assigned to one of two types, called kappa (κ) and lambda (λ), based on the amino acid sequence of its constant domain.

[0176] An “antibody fragment” refers to a molecule other than an intact antibody that comprises a portion of an intact antibody that binds the antigen to which the intact antibody binds.

[0177] Examples of antibody fragments include but are not limited to Fv, Fab, Fab′, Fab′-SH, F(ab′)₂; diabodies, triabodies, tetrabodies, crossFab fragments; linear antibodies; single-chain antibody molecules (e.g. scFv); and single domain antibodies. For a review of certain antibody fragments, see Hudson et al., Nat Med 9, 129-134 (2003). For a review of scFv fragments, see e.g. Plückthun, in The Pharmacology of Monoclonal Antibodies, vol. 113, Rosenburg and Moore eds., Springer-Verlag, New York, pp. 269-315 (1994); see also WO 93/16185; and U.S. Pat. Nos. 5,571,894 and 5,587,458. For discussion of Fab and F(ab′)2 fragments comprising salvage receptor binding epitope residues and having increased in vivo half-life, see U.S. Pat. No. 5,869,046. Diabodies are antibody fragments with two antigen-binding sites that may be bivalent or bispecific, see, for example, EP 404,097; WO 1993/01161; Hudson et al., Nat Med 9, 129-134 (2003); and Hollinger et al., Proc Natl Acad Sci USA 90, 6444-6448 (1993). Triabodies and tetrabodies are also described in Hudson et al., Nat Med 9, 129-134 (2003). Single-domain antibodies are antibody fragments comprising all or a portion of the heavy chain variable domain or all or a portion of the light chain variable domain of an antibody. In certain embodiments, a single-domain antibody is a human single-domain antibody (Domantis, Inc., Waltham, Mass.; see e.g. U.S. Pat. No. 6,248,516 B1). Antibody fragments can be made by various techniques, including but not limited to proteolytic digestion of an intact antibody as well as production by recombinant host cells (e.g. E. coli or phage), as described herein.

[0178] Papain digestion of intact antibodies produces two identical antigen-binding fragments, called “Fab” fragments containing each the heavy- and light-chain variable domains and also the constant domain of the light chain and the first constant domain (CH1) of the heavy chain. As used herein, Thus, the term “Fab fragment” refers to an antibody fragment comprising a light chain fragment comprising a variable light chain (VL) domain and a constant domain of a light chain (CL), and a variable heavy chain (VH) domain and a first constant domain (CH1) of a heavy chain. Fab′ fragments differ from Fab fragments by the addition of a few residues at the carboxy terminus of the heavy chain CH1 domain including one or more cysteins from the antibody hinge region. Fab′-SH are Fab′ fragments in which the cysteine residue(s) of the constant domains bear a free thiol group. Pepsin treatment yields an F(ab′)₂ fragment that has two antigen-combining sites (two Fab fragments) and a part of the Fc region.

[0179] The term “crossFab fragment” or “xFab fragment” or “crossover Fab fragment” refers to a Fab fragment, wherein either the variable regions or the constant regions of the heavy and light chain are exchanged. Two different chain compositions of a crossover Fab molecule are possible and comprised in the bispecific antibodies of the invention: On the one hand, the variable regions of the Fab heavy and light chain are exchanged, i.e. the crossover Fab molecule comprises a peptide chain composed of the light chain variable (VL) domain and the heavy chain constant domain (CH1), and a peptide chain composed of the heavy chain variable domain (VH) and the light chain constant domain (CL). This crossover Fab molecule is also referred to as CrossFab (VLVH). On the other hand, when the constant regions of the Fab heavy and light chain are exchanged, the crossover Fab molecule comprises a peptide chain composed of the heavy chain variable domain (VH) and the light chain constant domain (CL), and a peptide chain composed of the light chain variable domain (VL) and the heavy chain constant domain (CH1). This crossover Fab molecule is also referred to as CrossFab_{(CLCH1)}.

[0180] A “single chain Fab fragment” or “scFab” is a polypeptide consisting of an antibody heavy chain variable domain (VH), an antibody constant domain 1 (CH1), an antibody light chain variable domain (VL), an antibody light chain constant domain (CL) and a linker, wherein said antibody domains and said linker have one of the following orders in N-terminal to C-terminal direction: a) VH-CH1-linker-VL-CL, b) VL-CL-linker-VH-CH1, c) VH-CL-linker-VL-CH1 or d) VL-CH1-linker-VH-CL; and wherein said linker is a polypeptide of at least 30 amino acids, preferably between 32 and 50 amino acids. Said single chain Fab fragments are stabilized via the natural disulfide bond between the CL domain and the CH1 domain. In addition, these single chain Fab molecules might be further stabilized by generation of interchain disulfide bonds via insertion of cysteine residues (e.g. position 44 in the variable heavy chain and position 100 in the variable light chain according to Kabat numbering).

[0181] A “crossover single chain Fab fragment” or “x-scFab” is a is a polypeptide consisting of an antibody heavy chain variable domain (VH), an antibody constant domain 1 (CH1), an antibody light chain variable domain (VL), an antibody light chain constant domain (CL) and a linker, wherein said antibody domains and said linker have one of the following orders in N-terminal to C-terminal direction: a) VH-CL-linker-VL-CH1 and b) VL-CH1-linker-VH-CL; wherein VH and VL form together an antigen-binding site which binds specifically to an antigen and wherein said linker is a polypeptide of at least 30 amino acids. In addition, these x-scFab molecules might be further stabilized by generation of interchain disulfide bonds via insertion of cysteine residues (e.g. position 44 in the variable heavy chain and position 100 in the variable light chain according to Kabat numbering).

[0182] A “single-chain variable fragment (scFv)” is a fusion protein of the variable regions of the heavy (VH) and light chains (VL) of an antibody, connected with a short linker peptide of ten to about 25 amino acids. The linker is usually rich in glycine for flexibility, as well as serine or threonine for solubility, and can either connect the N-terminus of the VH with the C-terminus of the VL, or vice versa. This protein retains the specificity of the original antibody, despite removal of the constant regions and the introduction of the linker. scFv antibodies are, e.g. described in Houston, J. S., Methods in Enzymol. 203 (1991) 46-96). In addition, antibody fragments comprise single chain polypeptides having the characteristics of a VH domain, namely being able to assemble together with a VL domain, or of a VL domain, namely being able to assemble together with a VH domain to a functional antigen binding site and thereby providing the antigen binding property of full length antibodies.

[0183] “Scaffold antigen binding proteins” are known in the art, for example, fibronectin and designed ankyrin repeat proteins (DARPins) have been used as alternative scaffolds for antigen-binding domains, see, e.g., Gebauer and Skerra, Engineered protein scaffolds as next-generation antibody therapeutics. Curr Opin Chem Biol 13:245-255 (2009) and Stumpp et al., Darpins: A new generation of protein therapeutics. Drug Discovery Today 13: 695-701 (2008). In one aspect of the invention, a scaffold antigen binding protein is selected from the group consisting of CTLA-4 (Evibody), Lipocalins (Anticalin), a Protein A-derived molecule such as Z-domain of Protein A (Affibody), an A-domain (Avimer/Maxibody), a serum transferrin (trans-body); a designed ankyrin repeat protein (DARPin), a variable domain of antibody light chain or heavy chain (single-domain antibody, sdAb), a variable domain of antibody heavy chain (nanobody, aVH), VNAR fragments, a fibronectin (AdNectin), a C-type lectin domain (Tetranectin); a variable domain of a new antigen receptor beta-lactamase (V_{N}AR fragments), a human gamma-crystallin or ubiquitin (Affilin molecules); a kunitz type domain of human protease inhibitors, microbodies such as the proteins from the knottin family, peptide aptamers and fibronectin (adnectin). CTLA-4 (Cytotoxic T Lymphocyte-associated Antigen 4) is a CD28-family receptor expressed on mainly CD4⁺ T-cells. Its extracellular domain has a variable domain-like Ig fold. Loops corresponding to CDRs of antibodies can be substituted with heterologous sequence to confer different binding properties. CTLA-4 molecules engineered to have different binding specificities are also known as Evibodies (e.g. U.S. Pat. No. 7,166,697B1). Evibodies are around the same size as the isolated variable region of an antibody (e.g. a domain antibody). For further details, see Journal of Immunological Methods 248 (1-2), 31-45 (2001). Lipocalins are a family of extracellular proteins which transport small hydrophobic molecules such as steroids, bilins, retinoids and lipids. They have a rigid beta-sheet secondary structure with a number of loops at the open end of the conical structure which can be engineered to bind to different target antigens. Anticalins are between 160-180 amino acids in size, and are derived from lipocalins. For further details, see Biochim Biophys Acta 1482: 337-350 (2000), U.S. Pat. No. 7,250,297B1 and US20070224633. An affibody is a scaffold derived from Protein A of Staphylococcus aureus which can be engineered to bind to antigen. The domain consists of a three-helical bundle of approximately 58 amino acids. Libraries have been generated by randomization of surface residues. For further details, see Protein Eng. Des. Sel. 2004, 17, 455-462 and EP 1641818A1. Avimers are multidomain proteins derived from the A-domain scaffold family. The native domains of approximately 35 amino acids adopt a defined disulfide bonded structure. Diversity is generated by shuffling of the natural variation exhibited by the family of A-domains. For further details, see Nature Biotechnology 23(12), 1556-1561 (2005) and Expert Opinion on Investigational Drugs 16(6), 909-917 (June 2007). A transferrin is a monomeric serum transport glycoprotein. Transferrins can be engineered to bind different target antigens by insertion of peptide sequences in a permissive surface loop. Examples of engineered transferrin scaffolds include the Trans-body. For further details, see J. Biol. Chem 274, 24066-24073 (1999). Designed Ankyrin Repeat Proteins (DARPins) are derived from Ankyrin which is a family of proteins that mediate attachment of integral membrane proteins to the cytoskeleton. A single ankyrin repeat is a 33 residue motif consisting of two alpha-helices and a beta-turn. They can be engineered to bind different target antigens by randomizing residues in the first alpha-helix and a beta-turn of each repeat. Their binding interface can be increased by increasing the number of modules (a method of affinity maturation). For further details, see J. Mol. Biol. 332, 489-503 (2003), PNAS 100(4), 1700-1705 (2003) and J. Mol. Biol. 369, 1015-1028 (2007) and US20040132028A1. A single-domain antibody is an antibody fragment consisting of a single monomeric variable antibody domain. The first single domains were derived from the variable domain of the antibody heavy chain from camelids (nanobodies or V_{H}H fragments). Furthermore, the term single-domain antibody includes an autonomous human heavy chain variable domain (aVH) or V_{NAR} fragments derived from sharks. Fibronectin is a scaffold which can be engineered to bind to antigen. Adnectins consists of a backbone of the natural amino acid sequence of the 10th domain of the repeating units of human fibronectin type III (FN3). Three loops at one end of the beta-sandwich can be engineered to enable an Adnectin to specifically recognize a therapeutic target of interest. For further details, see Protein Eng. Des. Sel. 18, 435-444 (2005), US20080139791, WO2005056764 and U.S. Pat. No. 6,818,418B1. Peptide aptamers are combinatorial recognition molecules that consist of a constant scaffold protein, typically thioredoxin (TrxA) which contains a constrained variable peptide loop inserted at the active site. For further details, see Expert Opin. Biol. Ther. 5, 783-797 (2005). Microbodies are derived from naturally occurring microproteins of 25-50 amino acids in length which contain 3-4 cysteine bridges—examples of microproteins include KalataBI and conotoxin and knottins. The microproteins have a loop which can beengineered to include upto 25 amino acids without affecting the overall fold of the microprotein. For further details of engineered knottin domains, see WO2008098796.

[0184] An “antigen binding molecule that binds to the same epitope” as a reference molecule refers to an antigen binding molecule that blocks binding of the reference molecule to its antigen in a competition assay by 50% or more, and conversely, the reference molecule blocks binding of the antigen binding molecule to its antigen in a competition assay by 50% or more.

[0185] The term “antigen binding domain” refers to the part of an antigen binding molecule that comprises the area which specifically binds to and is complementary to part or all of an antigen. Where an antigen is large, an antigen binding molecule may only bind to a particular part of the antigen, which part is termed an epitope. An antigen binding domain may be provided by, for example, one or more variable domains (also called variable regions). Preferably, an antigen binding domain comprises an antibody light chain variable domain (VL) and an antibody heavy chain variable domain (VH).

[0186] As used herein, the term “antigenic determinant” is synonymous with “antigen” and “epitope,” and refers to a site (e.g. a contiguous stretch of amino acids or a conformational configuration made up of different regions of non-contiguous amino acids) on a polypeptide macromolecule to which an antigen binding moiety binds, forming an antigen binding moiety-antigen complex. Useful antigenic determinants can be found, for example, on the surfaces of tumor cells, on the surfaces of virus-infected cells, on the surfaces of other diseased cells, on the surface of immune cells, free in blood serum, and/or in the extracellular matrix (ECM). The proteins useful as antigens herein can be any native form the proteins from any vertebrate source, including mammals such as primates (e.g. humans) and rodents (e.g. mice and rats), unless otherwise indicated. In a particular embodiment the antigen is a human protein. Where reference is made to a specific protein herein, the term encompasses the “full-length”, unprocessed protein as well as any form of the protein that results from processing in the cell. The term also encompasses naturally occurring variants of the protein, e.g. splice variants or allelic variants.

[0187] By “specific binding” is meant that the binding is selective for the antigen and can be discriminated from unwanted or non-specific interactions. The ability of an antigen binding molecule to bind to a specific antigen can be measured either through an enzyme-linked immunosorbent assay (ELISA) or other techniques familiar to one of skill in the art, e.g. Surface Plasmon Resonance (SPR) technique (analyzed on a BIAcore instrument) (Liljeblad et al., Glyco J 17, 323-329 (2000)), and traditional binding assays (Heeley, Endocr Res 28, 217-229 (2002)).

[0188] In one embodiment, the extent of binding of an antigen binding molecule to an unrelated protein is less than about 10% of the binding of the antigen binding molecule to the antigen as measured, e.g. by SPR. In certain embodiments, an molecule that binds to the antigen has a dissociation constant (Kd) of ≤1 μM, ≤100 nM, ≤10 nM, ≤1 nM, ≤0.1 nM, ≤0.01 nM, or ≤0.001 nM (e.g. 10⁻⁸ M or less, e.g. from 10⁻⁸ M to 10¹³ M, e.g. from 10⁻⁹ M to 10¹³ M). “Affinity” or “binding affinity” refers to the strength of the sum total of non-covalent interactions between a single binding site of a molecule (e.g. an antibody) and its binding partner (e.g. an antigen). Unless indicated otherwise, as used herein, “binding affinity” refers to intrinsic binding affinity which reflects a 1:1 interaction between members of a binding pair (e.g. antibody and antigen). The affinity of a molecule X for its partner Y can generally be represented by the dissociation constant (Kd), which is the ratio of dissociation and association rate constants (koff and kon, respectively). Thus, equivalent affinities may comprise different rate constants, as long as the ratio of the rate constants remains the same. Affinity can be measured by common methods known in the art, including those described herein. A particular method for measuring affinity is Surface Plasmon Resonance (SPR).

[0189] A “tumor-associated antigen” or TAA as used herein refers to an antigenic determinant presented on the surface of a target cell, for example a cell in a tumor such as a cancer cell, a cell of the tumor stroma, a malignant B lymphocyte or a melanoma cell. In certain aspects, the target cell antigen is an antigen on the surface of a tumor cell. In one aspect, TAA is selected from the group consisting of Fibroblast Activation Protein (FAP), Carcinoembryonic Antigen (CEA), Folate receptor alpha (FolR1), Melanoma-associated Chondroitin Sulfate Proteoglycan (MCSP), Epidermal Growth Factor Receptor (EGFR), human epidermal growth factor receptor 2 (HER2), p95HER2, EpCAM, HER3, CD30 or TPBG (5T4), CD19, CD79b, CD20, CD22, CD37, CD38, BCMA and GPRC5D. In one particular aspect, TAA is selected from the group consisting of Fibroblast Activation Protein (FAP), Carcinoembryonic Antigen (CEA), Folate receptor alpha (FolR1), Melanoma-associated Chondroitin Sulfate Proteoglycan (MCSP), Epidermal Growth Factor Receptor (EGFR), human epidermal growth factor receptor 2 (HER2) and p95HER2. In another particular aspect, TAA is selected from the group consisting of Fibroblast Activation Protein (FAP), Carcinoembryonic Antigen (CEA), EpCAM, HER3, CD30 or TPBG (5T4). In one particular aspect, the tumor-associated antigen is Fibroblast Activation Protein (FAP) or Carcinoembryonic Antigen (CEA). In one aspect, TAA is a B cell surface antigen selected from the group consisting of CD19, CD79b, CD20, CD22 and CD37, in particular CD19 and CD79b.

[0190] In one aspect, TAA is a Multiple Myeloma (MM) cell surface antigen selected from the group consisting of CD38, BCMA and GPRC5D.

[0191] The term “Fibroblast activation protein (FAP)”, also known as Prolyl endopeptidase FAP or Seprase (EC 3.4.21), refers to any native FAP from any vertebrate source, including mammals such as primates (e.g. humans) non-human primates (e.g. cynomolgus monkeys) and rodents (e.g. mice and rats), unless otherwise indicated. The term encompasses “full-length,” unprocessed FAP as well as any form of FAP that results from processing in the cell. The term also encompasses naturally occurring variants of FAP, e.g., splice variants or allelic variants. In one embodiment, the antigen binding molecule of the invention is capable of specific binding to human, mouse and/or cynomolgus FAP. The amino acid sequence of human FAP is shown in UniProt (www.uniprot.org) accession no. Q12884 (version 149, SEQ ID NO:2), or NCBI (www.ncbi.nlm.nih.gov/) RefSeq NP_004451.2. The extracellular domain (ECD) of human FAP extends from amino acid position 26 to 760. The amino acid sequence of a His-tagged human FAP ECD is shown in SEQ ID NO:135. The amino acid sequence of mouse FAP is shown in UniProt accession no. P97321 (version 126, SEQ ID NO:136), or NCBI RefSeq NP_032012.1. The extracellular domain (ECD) of mouse FAP extends from amino acid position 26 to 761. SEQ ID NO:137 shows the amino acid sequence of a His-tagged mouse FAP ECD. SEQ ID NO 138 shows the amino acid sequence, of a His-tagged cynomolgus FAP ECD. Preferably, an anti-FAP binding molecule of the invention binds to the extracellular domain of FAP.

[0192] The term “Carcinoembroynic antigen (CEA)”, also known as Carcinoembryonic antigen-related cell adhesion molecule 5 (CEACAM5), refers to any native CEA from any vertebrate source, including mammals such as primates (e.g. humans) non-human primates (e.g. cynomolgus monkeys) and rodents (e.g. mice and rats), unless otherwise indicated. The amino acid sequence of human CEA is shown in UniProt accession no. P06731 (version 151, SEQ ID NO:3). CEA has long been identified as a tumor-associated antigen (Gold and Freedman, J Exp Med., 121:439-462, 1965; Berinstein N. L., J Clin Oncol., 20:2197-2207, 2002). Originally classified as a protein expressed only in fetal tissue, CEA has now been identified in several normal adult tissues. These tissues are primarily epithelial in origin, including cells of the gastrointestinal, respiratory, and urogential tracts, and cells of colon, cervix, sweat glands, and prostate (Nap et al., Tumour Biol., 9(2-3):145-53, 1988; Nap et al., Cancer Res., 52(8):2329-23339, 1992). Tumors of epithelial origin, as well as their metastases, contain CEA as a tumor associated antigen. While the presence of CEA itself does not indicate transformation to a cancerous cell, the distribution of CEA is indicative. In normal tissue, CEA is generally expressed on the apical surface of the cell (Hammarstrom S., Semin Cancer Biol. 9(2):67-81 (1999)), making it inaccessible to antibody in the blood stream. In contrast to normal tissue, CEA tends to be expressed over the entire surface of cancerous cells (Hammarstrom S., Semin Cancer Biol. 9(2):67-81 (1999)). This change of expression pattern makes CEA accessible to antibody binding in cancerous cells. In addition, CEA expression increases in cancerous cells. Furthermore, increased CEA expression promotes increased intercellular adhesions, which may lead to metastasis (Marshall J., Semin Oncol., 30 (a Suppl. 8):30-6, 2003). The prevalence of CEA expression in various tumor entities is generally very high. In concordance with published data, own analyses performed in tissue samples confirmed its high prevalence, with approximately 95% in colorectal carcinoma (CRC), 90% in pancreatic cancer, 80% in gastric cancer, 60% in non-small cell lung cancer (NSCLC, where it is co-expressed with HER3), and 40% in breast cancer; low expression was found in small cell lung cancer and glioblastoma.

[0193] CEA is readily cleaved from the cell surface and shed into the blood stream from tumors, either directly or via the lymphatics. Because of this property, the level of serum CEA has been used as a clinical marker for diagnosis of cancers and screening for recurrence of cancers, particularly colorectal cancer (Goldenberg D M., The International Journal of Biological Markers, 7:183-188, 1992; Chau I., et al., J Clin Oncol., 22:1420-1429, 2004; Flamini et al., Clin Cancer Res; 12(23):6985-6988, 2006).

[0194] The term “epithelial cell adhesion molecule (EpCAM)” refers to any native EpCAM from any vertebrate source, including mammals such as primates (e.g. humans) non-human primates (e.g. cynomolgus monkeys) and rodents (e.g. mice and rats), unless otherwise indicated. The term encompasses “full-length,” unprocessed EpCAM as well as any form of EpCAM that results from processing in the cell. The term also encompasses naturally occurring variants of EpCAM, e.g., splice variants or allelic variants. In one embodiment, the antigen binding molecule of the invention is capable of specific binding to human, mouse and/or cynomolgus EpCAM. The amino acid sequence of human EpCAM is shown in UniProt (www.uniprot.org) accession no. P16422 (version 167, SEQ ID NO:68), or NCBI (www.ncbi.nlm.nih.gov/) RefSeq NP_002345.2. The amino acid sequence of mouse EpCAM is shown in UniProt (www.uniprot.org) accession no. Q99JW5 (version 111, SEQ ID NO:75), or NCBI (www.ncbi.nlm.nih.gov/) RefSeq NP_032558.2. Epithelial cell adhesion molecule (EpCAM)—also known as tumor-associated calcium signal transducer 1 (TACSTD1), 17-1A and CD326—is a type I˜40 kDa transmembrane glycoprotein that is frequently overexpressed in cancers of epithelial origin and by cancer stem cells, and is therefore a molecule of significant interest for therapy and diagnosis. The extracellular domain EpCAM can be cleaved to yield the soluble extracellular domain molecule EpEX, and the intracellular molecule EpICD. EpICD has been shown to associate with other proteins to form a nuclear complex which upregulates the expression of genes promoting cell proliferation. EpCAM may also be involved in the epithelial to mesenchymal cell transition (EMT), and may contribute to the formation of large metastases. “CD30” or “TNFRSF8” is a member of the tumor necrosis factor receptor superfamily. It is characteristically expressed in certain hematopoietic malignancies, including anaplastic large cell lymphoma and Hodgkin lymphoma, among others. The variable expression of CD30 on both normal and malignant lymphoid cells has focused research efforts on understanding the pathogenesis of CD30 upregulation, its contribution to lymphomagenesis through anti-apoptotic mechanisms, and its effect on cell survival. Given the restriction of CD30 to certain tumor types, the logical extension of this has been to attempt to exploit it as a therapeutic target. The CD30 is a 120 kD transmembrane glycoprotein receptor belonging to the tumor necrosis factor receptor (TNFR) superfamily, with intracellular, trans-membrane and extracellular domains and the amino acid sequence of human CD30 is shown in UniProt accession no. P28908 (SEQ ID NO:472),

[0195] The term “TPBG” refers to Trophoblast glycoprotein, also referred to as “5T4”. TBPG is a leucine-rich transmembrane glycoprotein involved in cell adhesion. In adults this protein is highly expressed in many tumor cells and is associated with poor clinical outcome in numerous cancers. It refers to any native TPBG from any vertebrate source, including mammals such as primates (e.g. humans) non-human primates (e.g. cynomolgus monkeys) and rodents (e.g. mice and rats), unless otherwise indicated. The amino acid sequence of human TPBG is shown in UniProt accession no. Q13641 (SEQ ID NO: 473).

[0196] The term “FolR1” refers to Folate receptor alpha and has been identified as a potential prognostic and therapeutic target in a number of cancers. It refers to any native FolR1 from any vertebrate source, including mammals such as primates (e.g. humans) non-human primates (e.g. cynomolgus monkeys) and rodents (e.g. mice and rats), unless otherwise indicated. The amino acid sequence of human FolR1 is shown in UniProt accession no. P15328 (SEQ ID NO: 139), murine FolR1 has the amino acid sequence of UniProt accession no. P35846 (SEQ ID NO:140) and cynomolgus FolR1 has the amino acid sequence as shown in UniProt accession no. G7PR14 (SEQ ID NO:141). FolR1 is an N-glycosylated protein expressed on plasma membrane of cells. FolR1 has a high affinity for folic acid and for several reduced folic acid derivatives and mediates delivery of the physiological folate, 5-methyltetrahydrofolate, to the interior of cells. FOLR1 is a desirable target for FOLR1-directed cancer therapy as it is overexpressed in vast majority of ovarian cancers, as well as in many uterine, endometrial, pancreatic, renal, lung, and breast cancers, while the expression of FOLR1 on normal tissues is restricted to the apical membrane of epithelial cells in the kidney proximal tubules, alveolar pneumocytes of the lung, bladder, testes, choroid plexus, and thyroid. Recent studies have identified that FolR1 expression is particularly high in triple negative breast cancers (Necela et al. PloS One 2015, 10(3), e0127133).

[0197] The term “Melanoma-associated Chondroitin Sulfate Proteoglycan (MCSP)”, also known as Chondroitin Sulfate Proteoglycan 4 (CSPG4) refers to any native MCSP from any vertebrate source, including mammals such as primates (e.g. humans) non-human primates (e.g. cynomolgus monkeys) and rodents (e.g. mice and rats), unless otherwise indicated. The amino acid sequence of human MCSP is shown in UniProt accession no. Q6UVK1 (version 103, SEQ ID NO: 142). MCSP is a highly glycosylated integral membrane chondroitin sulfate proteoglycan consisting of an N-linked 280 kDa glycoprotein component and a 450-kDa chondroitin sulfate proteoglycan component expressed on the cell membrane (Ross et al., Arch. Biochem. Biophys. 1983, 225:370-38). MCSP is more broadly distributed in a number of normal and transformed cells. In particular, MCSP is found in almost all basal cells of the epidermis. MCSP is differentially expressed in melanoma cells, and was found to be expressed in more than 90% of benign nevi and melanoma lesions analyzed. MCSP has also been found to be expressed in tumors of nonmelanocytic origin, including basal cell carcinoma, various tumors of neural crest origin, and in breast carcinomas.

[0198] The term “Epidermal Growth Factor Receptor (EGFR)”, also named Proto-oncogene c-ErbB-1 or Receptor tyrosine-protein kinase erbB-1, refers to any native EGFR from any vertebrate source, including mammals such as primates (e.g. humans) non-human primates (e.g. cynomolgus monkeys) and rodents (e.g. mice and rats), unless otherwise indicated. The amino acid sequence of human EGFR is shown in UniProt accession no. P00533 (version 211, SEQ ID NO: 143). The proto-oncogene “HER2”, (human epidermal growth factor receptor 2) encodes a protein tyrosine kinase (p185HER2) that is related to and somewhat homologous to the human epidermal growth factor receptor. HER2 is also known in the field as c-erbB-2, and sometimes by the name of the rat homolog, neu. Amplification and/or overexpression of HER2 is associated with multiple human malignancies and appears to be integrally involved in progression of 25-30% of human breast and ovarian cancers. Furthermore, the extent of amplification is inversely correlated with the observed median patient survival time (Slamon, 1). J. et al., Science 244:707-712 (1989)). The amino acid sequence of human HER2 is shown in UniProt accession no. P04626 (version 230, SEQ ID NO: 144). The term “p95HER2” as used herein refers to a carboxy terminal fragment (CTF) of the HER2 receptor protein, which is also known as “611-CTF” or “100-115 kDa p95HER2”. The p95HER2 fragment is generated in the cell through initiation of translation of the HER2 mRNA at codon position 611 of the full-length HER2 molecule (Anido et al, EMBO J 25; 3234-44 (2006)). It has a molecular weight of 100 to 115 kDa and is expressed at the cell membrane, where it can form homodimers maintained by intermolecular disulfide bonds (Pedersen et al., Mol Cell Biol 29, 3319-31 (2009)). An exemplary sequence of human p95HER2 is given in SEQ ID NO: 145. “HER3” or “ErbB3” (human epidermal growth factor receptor 3), like the other members of the ErbB receptor tyrosine kinase family, consists of an extracellular domain, a transmembrane domain, and an intracellular domain. The extracellular domain contains four subdomains (I-IV). Subdomains I and III are leucine-rich and are primarily involved in ligand binding. Subdomains II and IV are cysteine-rich and most likely contribute to protein conformation and stability through the formation of disulfide bonds. Subdomain II also contains the dimerization loop required for dimer formation. The cytoplasmic domain contains a juxtamembrane segment, a kinase domain, and a C-terminal domain. While no evidence has been found that ErbB3 overexpression, constitutive activation, or mutation alone is oncogenic, https://en.wikipedia.orgwiki/ERBB3—cite_note-pmid8632008-18 the protein as a heterodimerization partner, most critically with ErbB2, is implicated in growth, proliferation, chemotherapeutic resistance, and the promotion of invasion and metastasis. ErbB3 is associated with targeted therapeutic resistance in numerous cancers. The amino acid sequence of human HER3 is shown in UniProt accession no. P21860 (version 224, SEQ ID NO:471) A “B cell surface antigen” as used herein refers to an antigenic determinant presented on the surface of a B lymphocyte, particularly a malignant B lymphocyte (in that case the antigen also being referred to as “malignant B-cell surface antigen”). Several B-cell surface antigens are interesting in terms of immunotherapy of hematologic malignant neoplasms. In one aspect, the B cell surface antigen is selected from the group consisting of CD19, CD79b, CD20, CD22 and CD37.

[0199] The term “CD19” refers to B-lymphocyte antigen CD19, also known as B-lymphocyte surface antigen B4 or T-cell surface antigen Leu-12 and includes any native CD19 from any vertebrate source, including mammals such as primates (e.g. humans) non-human primates (e.g. cynomolgus monkeys) and rodents (e.g. mice and rats), unless otherwise indicated. The amino acid sequence of human CD19 is shown in Uniprot accession no. P15391 (version 160, SEQ ID NO:434). The term encompasses “full-length” unprocessed human CD19 as well as any form of human CD19 that results from processing in the cell as long as the antibody as reported herein binds thereto. CD19 is a structurally distinct cell surface receptor expressed on the surface of human B cells, including, but not limited to, pre-B cells, B cells in early development {i.e., immature B cells), mature B cells through terminal differentiation into plasma cells, and malignant B cells. CD19 is expressed by most pre-B acute lymphoblastic leukemias (ALL), non-Hodgkin's lymphomas, B cell chronic lymphocytic leukemias (CLL), pro-lymphocytic leukemias, hairy cell leukemias, common acute lymphocytic leukemias, and some Null-acute lymphoblastic leukemias. The expression of CD19 on plasma cells further suggests it may be expressed on differentiated B cell tumors such as multiple myeloma. Therefore, the CD19 antigen is a target for immunotherapy in the treatment of non-Hodgkin's lymphoma, chronic lymphocytic leukemia and/or acute lymphoblastic leukemia.

[0200] “CD79b” refers to B-cell antigen receptor complex-associated protein beta chain, also known as Ig-beta or B cell specific glycoprotein B29, and includes any native CD79b from any vertebrate source, including mammals such as primates (e.g. humans) non-human primates (e.g. cynomolgus monkeys) and rodents (e.g. mice and rats), unless otherwise indicated. The amino acid sequence of human CD79b is shown in Uniprot accession no. P40259 (version 180, SEQ ID NO:435). CD79b is a 39 KDa protein exclusively expressed on B cells and, in cooperation with CD79a, initiates the signal transduction cascade downstream of the BCR, which leads to internalization of the BCR complex, its translocation to the endosomes, and antigen presentation. CD79 (composed of subunits CD79a and CD79b) is a heterodimeric signal-transduction component of the B-cell receptor, ubiquitously expressed in mature B-cell lymphomas and placed on the cell surface by the earliest committed B-cell progenitors before expression of immunoglobulin μ. The term “CD79b” encompasses “full-length,” unprocessed CD79b as well as any form of CD79b that results from processing in the cell. The term also encompasses naturally occurring variants of CD79b, e.g., splice variants or allelic variants.

[0201] “CD20” refers to B-lymphocyte antigen CD20, also known as B-lymphocyte surface antigen B1 or Leukocyte surface antigen Leu-16, and includes any native CD20 from any vertebrate source, including mammals such as primates (e.g. humans) non-human primates (e.g. cynomolgus monkeys) and rodents (e.g. mice and rats), unless otherwise indicated. The amino acid sequence of human CD20 is shown in Uniprot accession no. P11836 (version 149, SEQ ID NO:436). CD20 is a hydrophobic transmembrane protein with a molecular weight of approximately 35 kD expressed on pre-B and mature B lymphocytes. The corresponding human gene is membrane-spanning 4-domains, subfamily A, member 1, also known as MS4A1. This gene encodes a member of the membrane-spanning 4A gene family. Members of this nascent protein family are characterized by common structural features and similar intron/exon splice boundaries and display unique expression patterns among hematopoietic cells and nonlymphoid tissues. This gene encodes the B-lymphocyte surface molecule which plays a role in the development and differentiation of B-cells into plasma cells. This family member is localized to 11q12, among a cluster of family members. Alternative splicing of this gene results in two transcript variants which encode the same protein. The term “CD20” encompasses “full-length,” unprocessed CD20 as well as any form of CD20 that results from processing in the cell. The term also encompasses naturally occurring variants of CD20, e.g., splice variants or allelic variants.

[0202] “CD22” refers to B-cell receptor CD22, also known as B-lymphocyte cell adhesion molecule or SIGLEC2, and includes any native CD22 from any vertebrate source, including mammals such as primates (e.g. humans) non-human primates (e.g. cynomolgus monkeys) and rodents (e.g. mice and rats), unless otherwise indicated. The amino acid sequence of human CD22 is shown in Uniprot accession no. P20273 (version 209, SEQ ID NO:437). CD22 is a molecule belonging to the SIGLEC family of lectins and is found on the surface of mature B cells and to lesser extent on some immature B cells. CD22 is thus a B cell restricted cell surface phosphoglycoprotein of 130-150 kDa and is capable of modulating B lymphocyte antigen receptor (BCR)-mediated signals, as well as the generation of BCR-independent signals. The term “CD22” encompasses “full-length,” unprocessed CD22 as well as any form of CD22 that results from processing in the cell. The term also encompasses naturally occurring variants of CD22, e.g., splice variants or allelic variants. “CD37” refers to Leukocyte antigen CD37, also known as Tetraspanin-26 (Tspan-26), and includes any native CD37 from any vertebrate source, including mammals such as primates (e.g. humans) non-human primates (e.g. cynomolgus monkeys) and rodents (e.g. mice and rats), unless otherwise indicated. The amino acid sequence of human CD37 is shown in Uniprot accession no. P11049 (version 162, SEQ ID NO:438). CD37 expression is restricted to cells of the immune system, with highest abundance on mature B cells, and lower expression is found on T cells and myeloid cells. The glycoprotein CD37 is a member of the transmembrane 4 superfamily and controls both humoral and cellular immune responses. The term “CD37” encompasses “full-length,” unprocessed CD37 as well as any form of CD37 that results from processing in the cell. The term also encompasses naturally occurring variants of CD37, e.g., splice variants or allelic variants.

[0203] A “Multiple Myeloma (MM) cell surface antigen” as used herein refers to an antigenic determinant presented on the surface of a Multiple Myeloma (MM) cell. Several MM cell surface antigens are interesting in terms of immunotherapy of Multiple Myeloma. In one aspect, the MM cell surface antigen is selected from the group consisting of CD38, BCMA and GPRC5D.

[0204] The term “CD38”, also known as cluster of differentiation 38 or cyclic ADP ribose hydrolase, is a glycoprotein found on the surface of many immune cells (white blood cells), including CD4+, CD8+, B lymphocytes and natural killer cells. CD38 also functions in cell adhesion, signal transduction and calcium signaling. Under normal conditions, CD38 is expressed at relatively low levels on myeloid and lymphoid cells and in some non-hematopoietic tissues. In contrast, normal plasma cells and multiple myeloma (MM) cells have high levels of CD38 expression, which makes CD38 an interesting target for targeting cell surface molecules in MM. CD38 as used herein refers to any CD38 protein from any vertebrate source, including mammals such as primates (e.g. humans) non-human primates (e.g. cynomolgus monkeys) and rodents (e.g. mice and rats), unless otherwise indicated. The amino acid sequence of human CD38 is shown in UniProt (www.uniprot.org) accession no. P28907 (SEQ ID NO:474).

[0205] The term “BCMA” refers to B cell maturation antigen, also termed tumor necrosis factor receptor superfamily member 17 (TNFRS 17), and is a type III transmembrane protein without a signal-peptide and containing cysteine-rich extracellular domains. BCMA is expressed at significantly higher levels in all patient MM cells but not on other normal tissues except normal plasma cells. BCMA, along with two related TNFR superfamily B-cell activation factor receptor (BAFF-R) and transmembrane activator and calcium modulator and cyclophilin ligand interactor (TACI), critically regulate B cell proliferation and survival, as well as maturation and differentiation into plasma cells. These three functionally related receptors support long-term survival of B cells at different stages of development by binding to BAFF and/or APRIL, their cognate ligands. BCMA as used herein refers to any BCMA protein from any vertebrate source, including mammals such as primates (e.g. humans) non-human primates (e.g. cynomolgus monkeys) and rodents (e.g. mice and rats), unless otherwise indicated. The amino acid sequence of human BCMA is shown in UniProt (www.uniprot.org) accession no. Q02223 (SEQ ID NO:475).

[0206] The term “GPRC5D” refers to G protein-coupled receptor class C group 5 member D, a target identified from plasma cells in multiple myeloma using RNA-sequencing. It has been reported that GPRC5D is associated with poor prognosis and tumour load in multiple myeloma patients. GPRC5D) refers to any GPRC5D protein from any vertebrate source, including mammals such as primates (e.g. humans) non-human primates (e.g. cynomolgus monkeys) and rodents (e.g. mice and rats), unless otherwise indicated. The amino acid sequence of human GPRC5D is shown in UniProt (www.uniprot.org) accession no. Q9NZD1 (SEQ ID NO:476).

[0207] The term “CD28” (Cluster of differentiation 28, Tp44) refers to any CD28 protein from any vertebrate source, including mammals such as primates (e.g. humans) non-human primates (e.g. cynomolgus monkeys) and rodents (e.g. mice and rats), unless otherwise indicated. CD28 is expressed on T cells and provides co-stimulatory signals required for T cell activation and survival. T cell stimulation through CD28 in addition to the T-cell receptor (TCR) can provide a potent signal for the production of various interleukins. CD28 is the receptor for CD80 (B7.1) and CD86 (B7.2) proteins and is the only B7 receptor constitutively expressed on naïve T cells. The amino acid sequence of human CD28 is shown in UniProt (www.uniprot.org) accession no. P10747 (SEQ ID NO:1).

[0208] An “agonistic antibody” refers to an antibody that comprises an agonistic function against a given receptor. In general, when an agonist ligand (factor) binds to a receptor, the tertiary structure of the receptor protein changes, and the receptor is activated (when the receptor is a membrane protein, a cell growth signal or such is usually transducted). If the receptor is a dimer-forming type, an agonistic antibody can dimerize the receptor at an appropriate distance and angle, thus acting similarly to a ligand. An appropriate anti-receptor antibody can mimic dimerization of receptors performed by ligands, and thus can become an agonistic antibody.

[0209] A “CD28 agonistic antigen binding molecule” or “CD128 conventional agonistic antigen binding molecule” is an antigen binding molecule that mimicks CD28 natural ligands (CD80 or CD86) in their role to enhance T cell activation in presence of a T cell receptor signal (“signal 2”). A T cell needs two signals to become fully activated. Under physiological conditions “signal 1” arises form the interaction of T cell receptor (TCR) molecules with peptide/major histocompatibility complex (MHC) complexes on antigen presenting cells (APCs) and “signal 2” is provided by engagement of a costimulatory receptor, e.g. CD28. A CD28 agonistic antigen binding molecule is able to costimulate T cells (signal 2). It is also able to induce T cell proliferation and cytokine secretion in combination with a molecule with specificity for the TCR complex, however the CD28 agonistic antigen binding molecule is not capable of fully activating T cells without additional stimulation of the TCR. There is however a subclass of CD28 specific antigen binding molecules, the so-called CD28 superagonistic antigen binding molecules. A “CD28 superagonistic antigen binding molecule” is a CD28 antigen binding molecule which is capable of fully activating T cells without additional stimulation of the TCR. A CD28 superagonistic antigen binding molecule is capable to induce T cell proliferation and cytokine secretion without prior T cell activation (signal 1).

[0210] The term “variable domain” or “variable region” refers to the domain of an antibody heavy or light chain that is involved in binding the antigen binding molecule to antigen. The variable domains of the heavy chain and light chain (VH and VL, respectively) of a native antibody generally have similar structures, with each domain comprising four conserved framework regions (FRs) and three hypervariable regions (HVRs). See, e.g., Kindt et al., Kuby Immunology, 6th ed., W.H. Freeman and Co., page 91 (2007). A single VH or VL domain may be sufficient to confer antigen-binding specificity.

[0211] The term “hypervariable region” or “HVR” as used herein refers to each of the regions of an antigen binding variable domain which are hypervariable in sequence and which determine antigen binding specificity, for example “complementarity determining regions” (“CDRs”). Generally, antigen binding domains comprise six CDRs: three in the VH (CDR-H1, CDR-H2, CDR-H3), and three in the VL (CDR-L1, CDR-L2, CDR-L3). Exemplary CDRs herein include:

[0212] (a) hypervariable loops occurring at amino acid residues 26-32 (L1), 50-52 (L2), 91-96 (L3), 26-32 (H1), 53-55 (H2), and 96-101 (H3) (Chothia and Lesk, J. Mol. Biol. 196:901-917 (1987));

[0213] (b) CDRs occurring at amino acid residues 24-34 (L1), 50-56 (L2), 89-97 (L3), 31-35b (H1), 50-65 (H2), and 95-102 (H3) (Kabat et al., Sequences of Proteins of Immunological Interest, 5th Ed. Public Health Service, National Institutes of Health, Bethesda, Md. (1991)); and

[0214] (c) antigen contacts occurring at amino acid residues 27c-36 (L1), 46-55 (L2), 89-96 (L3), 30-35b (H1), 47-58 (H2), and 93-101 (H3) (MacCallum et al. J. Mol. Biol. 262: 732-745 (1996)).

[0215] Unless otherwise indicated, the CDRs are determined according to Kabat et al., supra. One of skill in the art will understand that the CDR designations can also be determined according to Chothia, supra, McCallum, supra, or any other scientifically accepted nomenclature. Kabat et al. also defined a numbering system for variable region sequences that is applicable to any antibody. One of ordinary skill in the art can unambiguously assign this system of “Kabat numbering” to any variable region sequence, without reliance on any experimental data beyond the sequence itself. As used herein, “Kabat numbering” refers to the numbering system set forth by Kabat et al., U.S. Dept. of Health and Human Services, “Sequence of Proteins of Immunological Interest” (1983). Unless otherwise specified, references to the numbering of specific amino acid residue positions in an antibody variable region are according to the Kabat numbering system.

[0216] As used herein, the term “affinity matured” in the context of antigen binding molecules (e.g., antibodies) refers to an antigen binding molecule that is derived from a reference antigen binding molecule, e.g., by mutation, binds to the same antigen, preferably binds to the same epitope, as the reference antibody; and has a higher affinity for the antigen than that of the reference antigen binding molecule. Affinity maturation generally involves modification of one or more amino acid residues in one or more CDRs of the antigen binding molecule. Typically, the affinity matured antigen binding molecule binds to the same epitope as the initial reference antigen binding molecule.

[0217] “Framework” or “FR” refers to variable domain residues other than hypervariable region (HVR) residues. The FR of a variable domain generally consists of four FR domains: FR1, FR2, FR3, and FR4. Accordingly, the HVR and FR sequences generally appear in the following sequence in VH (or VL): FR1-H1(L1)-FR2-H2(L2)-FR3-H3 (L3)-FR4.

[0218] An “acceptor human framework” for the purposes herein is a framework comprising the amino acid sequence of a light chain variable domain (VL) framework or a heavy chain variable domain (VH) framework derived from a human immunoglobulin framework or a human consensus framework, as defined below. An acceptor human framework “derived from” a human immunoglobulin framework or a human consensus framework may comprise the same amino acid sequence thereof, or it may contain amino acid sequence changes. In some embodiments, the number of amino acid changes are 10 or less, 9 or less, 8 or less, 7 or less, 6 or less, 5 or less, 4 or less, 3 or less, or 2 or less. In some embodiments, the VL acceptor human framework is identical in sequence to the VL human immunoglobulin framework sequence or human consensus framework sequence.

[0219] The term “chimeric” antibody refers to an antibody in which a portion of the heavy and/or light chain is derived from a particular source or species, while the remainder of the heavy and/or light chain is derived from a different source or species.

[0220] The “class” of an antibody refers to the type of constant domain or constant region possessed by its heavy chain. There are five major classes of antibodies: IgA, IgD, IgE, IgG, and IgM, and several of these may be further divided into subclasses (isotypes), e.g. IgG₁, IgG₂, IgG₃, IgG₄, IgA₁, and IgA₂. The heavy chain constant domains that correspond to the different classes of immunoglobulins are called α, δ, ε, γ, and μ respectively.

[0221] A “humanized” antibody refers to a chimeric antibody comprising amino acid residues from non-human HVRs and amino acid residues from human FRs. In certain embodiments, a humanized antibody will comprise substantially all of at least one, and typically two, variable domains, in which all or substantially all of the HVRs (e.g., CDRs) correspond to those of a non-human antibody, and all or substantially all of the FRs correspond to those of a human antibody. A humanized antibody optionally may comprise at least a portion of an antibody constant region derived from a human antibody. A “humanized form” of an antibody, e.g., a non-human antibody, refers to an antibody that has undergone humanization. Other forms of “humanized antibodies” encompassed by the present invention are those in which the constant region has been additionally modified or changed from that of the original antibody to generate the properties according to the invention, especially in regard to Clq binding and/or Fc receptor (FcR) binding.

[0222] A “human” antibody is one which possesses an amino acid sequence which corresponds to that of an antibody produced by a human or a human cell or derived from a non-human source that utilizes human antibody repertoires or other human antibody-encoding sequences. This definition of a human antibody specifically excludes a humanized antibody comprising non-human antigen-binding residues.

[0223] The term “CH1 domain” denotes the part of an antibody heavy chain polypeptide that extends approximately from EU position 118 to EU position 215 (EU numbering system according to Kabat). In one aspect, a CH1 domain has the amino acid sequence of ASTKGPSVFP LAPSSKSTSG GTAALGCLVK DYFPEPVTVS WNSGALTSGV HTFPAVLQSS GLYSLSSVVT VPSSSLGTQT YICNVNHKPS NTKVDKKV (SEQ ID NO: 477). Usually, a segment having the amino acid sequence of EPKSC (SEQ ID NO:480) is following to link the CH1 domain to the hinge region,

[0224] The term “hinge region” denotes the part of an antibody heavy chain polypeptide that joins in a wild-type antibody heavy chain the CH1 domain and the CH2 domain, e.g. from about position 216 to about position 230 according to the EU number system of Kabat, or from about position 226 to about position 230 according to the EU number system of Kabat. The hinge regions of other IgG subclasses can be determined by aligning with the hinge-region cysteine residues of the IgG1 subclass sequence. The hinge region is normally a dimeric molecule consisting of two polypeptides with identical amino acid sequence. The hinge region generally comprises up to 25 amino acid residues and is flexible allowing the associated target binding sites to move independently. The hinge region can be subdivided into three domains: the upper, the middle, and the lower hinge domain (see e.g. Roux, et al., J. Immunol. 161 (1998) 4083).

[0225] In one aspect, the hinge region has the amino acid sequence DKTHTCPXCP (SEQ ID NO: 481), wherein X is either S or P. In one aspect, the hinge region has the amino acid sequence HTCPXCP (SEQ ID NO: 482), wherein X is either S or P. In one aspect, the hinge region has the amino acid sequence CPXCP (SEQ ID NO:483), wherein X is either S or P.

[0226] The term “Fc domain” or “Fc region” herein is used to define a C-terminal region of an antibody heavy chain that contains at least a portion of the constant region. The term includes native sequence Fc regions and variant Fc regions. An IgG Fc region comprises an IgG CH2 and an IgG CH3 domain.

[0227] The “CH2 domain” of a human IgG Fc region usually extends from an amino acid residue at about EU position 231 to an amino acid residue at about EU position 340 (EU numbering system according to Kabat). In one aspect, a CH2 domain has the amino acid sequence of APELLGGPSV FLFPPKPKDT LMISRTPEVT CVWDVSHEDP EVKFNWYVDG VEVHNAKTKP REEQESTYRW SVLTVLHQDW LNGKEYKCKV SNKALPAPIE KTISKAK (SEQ ID NO: 478). The CH2 domain is unique in that it is not closely paired with another domain. Rather, two N-linked branched carbohydrate chains are interposed between the two CH2 domains of an intact native Fc-region. It has been speculated that the carbohydrate may provide a substitute for the domain-domain pairing and help stabilize the CH2 domain. Burton, Mol. Immunol. 22 (1985) 161-206. In one embodiment, a carbohydrate chain is attached to the CH2 domain. The CH2 domain herein may be a native sequence CH2 domain or variant CH2 domain.

[0228] The “CH3 domain” comprises the stretch of residues C-terminal to a CH2 domain in an Fc region denotes the part of an antibody heavy chain polypeptide that extends approximately from EU position 341 to EU position 446 (EU numbering system according to Kabat). In one aspect, the CH3 domain has the amino acid sequence of [sequence omitted] (SEQ ID NO: 479). The CH3 region herein may be a native sequence CH3 domain or a variant CH3 domain (e.g. a CH3 domain with an introduced “protuberance” (“knob”) in one chain thereof and a corresponding introduced “cavity” (“hole”) in the other chain thereof; see U.S. Pat. No. 5,821,333, expressly incorporated herein by reference). Such variant CH3 domains may be used to promote heterodimerization of two non-identical antibody heavy chains as herein described. In one embodiment, a human IgG heavy chain Fc region extends from Cys226, or from Pro230, to the carboxyl-terminus of the heavy chain. However, the C-terminal lysine (Lys447) of the Fc region may or may not be present. Unless otherwise specified herein, numbering of amino acid residues in the Fc region or constant region is according to the EU numbering system, also called the EU index, as described in Kabat et al., Sequences of Proteins of Immunological Interest, 5th Ed. Public Health Service, National Institutes of Health, Bethesda, Md., 1991.

[0229] The “knob-into-hole” technology is described e.g. in U.S. Pat. Nos. 5,731,168; 7,695,936; Ridgway et al., Prot Eng 9, 617-621 (1996) and Carter, J Immunol Meth 248, 7-15 (2001). Generally, the method involves introducing a protuberance (“knob”) at the interface of a first polypeptide and a corresponding cavity (“hole”) in the interface of a second polypeptide, such that the protuberance can be positioned in the cavity so as to promote heterodimer formation and hinder homodimer formation. Protuberances are constructed by replacing small amino acid side chains from the interface of the first polypeptide with larger side chains (e.g. tyrosine or tryptophan). Compensatory cavities of identical or similar size to the protuberances are created in the interface of the second polypeptide by replacing large amino acid side chains with smaller ones (e.g. alanine or threonine). The protuberance and cavity can be made by altering the nucleic acid encoding the polypeptides, e.g. by site-specific mutagenesis, or by peptide synthesis. In a specific embodiment a knob modification comprises the amino acid substitution T366W in one of the two subunits of the Fc domain, and the hole modification comprises the amino acid substitutions T366S, L368A and Y407V in the other one of the two subunits of the Fc domain. In a further specific embodiment, the subunit of the Fc domain comprising the knob modification additionally comprises the amino acid substitution S354C, and the subunit of the Fc domain comprising the hole modification additionally comprises the amino acid substitution Y349C. Introduction of these two cysteine residues results in the formation of a disulfide bridge between the two subunits of the Fc region, thus further stabilizing the dimer (Carter, J Immunol Methods 248, 7-15 (2001)).

[0230] A “region equivalent to the Fc region of an immunoglobulin” is intended to include naturally occurring allelic variants of the Fc region of an immunoglobulin as well as variants having alterations which produce substitutions, additions, or deletions but which do not decrease substantially the ability of the immunoglobulin to mediate effector functions (such as antibody-dependent cellular cytotoxicity). For example, one or more amino acids can be deleted from the N-terminus or C-terminus of the Fc region of an immunoglobulin without substantial loss of biological function. Such variants can be selected according to general rules known in the art so as to have minimal effect on activity (see, e.g., Bowie, J. U. et al., Science 247:1306-10 (1990)).

[0231] The term “wild-type Fc domain” denotes an amino acid sequence identical to the amino acid sequence of an Fc domain found in nature. Wild-type human Fc domains include a native human IgG1 Fc-region (non-A and A allotypes), native human IgG2 Fc-region, native human IgG3 Fc-region, and native human IgG4 Fc-region as well as naturally occurring variants thereof. Wild-type Fc-regions are denoted in SEQ ID NO: 484 (IgG1, caucasian allotype), SEQ ID NO: 485 (IgG1, afroamerican allotype), SEQ ID NO: 486 (IgG2), SEQ ID NO: 487 (IgG3) and SEQ ID NO:488 (IgG4).

[0232] The term “variant (human) Fc domain” denotes an amino acid sequence which differs from that of a “wild-type” (human) Fc domain amino acid sequence by virtue of at least one “amino acid mutation”. In one aspect, the variant Fc-region has at least one amino acid mutation compared to a native Fc-region, e.g. from about one to about ten amino acid mutations, and in one aspect from about one to about five amino acid mutations in a native Fc-region. In one aspect, the (variant) Fc-region has at least about 95% homology with a wild-type Fc-region.

[0233] The term “effector functions” refers to those biological activities attributable to the Fc region of an antibody, which vary with the antibody isotype. Examples of antibody effector functions include: Clq binding and complement dependent cytotoxicity (CDC), Fc receptor binding, antibody-dependent cell-mediated cytotoxicity (ADCC), antibody-dependent cellular phagocytosis (ADCP), cytokine secretion, immune complex-mediated antigen uptake by antigen presenting cells, down regulation of cell surface receptors (e.g. B cell receptor), and B cell activation.

[0234] Fc receptor binding dependent effector functions can be mediated by the interaction of the Fc-region of an antibody with Fc receptors (FcRs), which are specialized cell surface receptors on hematopoietic cells. Fc receptors belong to the immunoglobulin superfamily, and have been shown to mediate both the removal of antibody-coated pathogens by phagocytosis of immune complexes, and the lysis of erythrocytes and various other cellular targets (e.g. tumor cells) coated with the corresponding antibody, via antibody dependent cell mediated cytotoxicity (ADCC) (see e.g. Van de Winkel, J. G. and Anderson, C. L., J. Leukoc. Biol. 49 (1991) 511-524). FcRs are defined by their specificity for immunoglobulin isotypes: Fc receptors for IgG antibodies are referred to as FcγR. Fc receptor binding is described e.g. in Ravetch, J. V. and Kinet, J. P., Annu. Rev. Immunol. 9 (1991) 457-492; Capel, P. J., et al., Immunomethods 4 (1994) 25-34; de Haas, M., et al., J. Lab. Clin. Med. 126 (1995) 330-341; and Gessner, J. E., et al., Ann. Hematol. 76 (1998) 231-248.

[0235] Cross-linking of receptors for the Fc-region of IgG antibodies (FcγR) triggers a wide variety of effector functions including phagocytosis, antibody-dependent cellular cytotoxicity, and release of inflammatory mediators, as well as immune complex clearance and regulation of antibody production. In humans, three classes of FcγR have been characterized, which are:
[0236] FcγRI (CD64) binds monomeric IgG with high affinity and is expressed on macrophages, monocytes, neutrophils and eosinophils. Modification in the Fc-region IgG at least at one of the amino acid residues E233-G236, P238, D265, N297, A327 and P329 (numbering according to EU index of Kabat) reduce binding to FcγRI. IgG2 residues at positions 233-236, substituted into IgG1 and IgG4, reduced binding to FcγRI by 10³-fold and eliminated the human monocyte response to antibody-sensitized red blood cells (Armour, K. L., et al., Eur. J. Immunol. 29 (1999) 2613-2624).
[0237] FcγRII (CD32) binds complexed IgG with medium to low affinity and is widely expressed. This receptor can be divided into two sub-types, FcγRIIA and FcγRIIB. FcγRIIA is found on many cells involved in killing (e.g. macrophages, monocytes, neutrophils) and seems able to activate the killing process. FcγRIIB seems to play a role in inhibitory processes and is found on B cells, macrophages and on mast cells and eosinophils. On B-cells it seems to function to suppress further immunoglobulin production and isotype switching to, for example, the IgE class. On macrophages, FcγRIIB acts to inhibit phagocytosis as mediated through FcγRIIA. On eosinophils and mast cells the B-form may help to suppress activation of these cells through IgE binding to its separate receptor. Reduced binding for FcγRIIA is found e.g. for antibodies comprising an IgG Fc-region with mutations at least at one of the amino acid residues E233-G236, P238, D265, N297, A327, P329, D270, Q295, A327, R292, and K414 (numbering according to EU index of Kabat).
[0238] FcγRIII (CD16) binds IgG with medium to low affinity and exists as two types. FcγRIIIA is found on NK cells, macrophages, eosinophils and some monocytes and T cells and mediates ADCC. FcγRIIIB is highly expressed on neutrophils. Reduced binding to FcγRIIIA is found e.g. for antibodies comprising an IgG Fc-region with mutation at least at one of the amino acid residues E233-G236, P238, D265, N297, A327, P329, D270, Q295, A327, S239, E269, E293, Y296, V303, A327, K338 and D376 (numbering according to EU index of Kabat).

[0239] Mapping of the binding sites on human IgG1 for Fc receptors, the above mentioned mutation sites and methods for measuring binding to FcγRI and FcγRIIA are described in Shields, R. L., et al. J. Biol. Chem. 276 (2001) 6591-6604.

[0240] The term “ADCC” or “antibody-dependent cellular cytotoxicity” is an immune mechanism leading to lysis of antibody-coated target cells by immune effector cells. The target cells are cells to which antibodies or derivatives thereof comprising an Fc region specifically bind, generally via the protein part that is N-terminal to the Fc region. As used herein, the term “reduced ADCC” is defined as either a reduction in the number of target cells that are lysed in a given time, at a given concentration of antibody in the medium surrounding the target cells, by the mechanism of ADCC defined above, and/or an increase in the concentration of antibody in the medium surrounding the target cells, required to achieve the lysis of a given number of target cells in a given time, by the mechanism of ADCC. The reduction in ADCC is relative to the ADCC mediated by the same antibody produced by the same type of host cells, using the same standard production, purification, formulation and storage methods (which are known to those skilled in the art), but that has not been engineered. For example, the reduction in ADCC mediated by an antibody comprising in its Fc domain an amino acid substitution that reduces ADCC, is relative to the ADCC mediated by the same antibody without this amino acid substitution in the Fc domain. Suitable assays to measure ADCC are well known in the art (see e.g. PCT publication no. WO 2006/082515 or PCT publication no. WO 2012/130831). For example, the capacity of the antibody to induce the initial steps mediating ADCC is investigated by measuring their binding to Fcγ receptors expressing cells, such as cells, recombinantly expressing FcγRI and/or FcγRIIA or NK cells (expressing essentially FcγRIIIA). In particular, binding to FcγR on NK cells is measured.

[0241] An “activating Fc receptor” is an Fc receptor that following engagement by an Fc region of an antibody elicits signaling events that stimulate the receptor-bearing cell to perform effector functions. Activating Fc receptors include FcγRIIIa (CD16a), FcγRI (CD64), FcγRIIa (CD32), and FcαRI (CD89). A particular activating Fc receptor is human FcγRIIIa (see UniProt accession no. P08637, version 141).

[0242] An “ectodomain” is the domain of a membrane protein that extends into the extracellular space (i.e. the space outside the target cell). Ectodomains are usually the parts of proteins that initiate contact with surfaces, which leads to signal transduction.

[0243] The term “peptide linker” refers to a peptide comprising one or more amino acids, typically about 2 to 20 amino acids. Peptide linkers are known in the art or are described herein. Suitable, non-immunogenic linker peptides are, for example, (G₄S)n, (SG₄)ₙ or G₄(SG₄)ₙ peptide linkers, wherein “n” is generally a number between 1 and 5, typically between 2 and 4, in particular 2, i.e. the peptides selected from the group consisting of GGGGS (SEQ ID NO: 146) GGGGSGGGGS (SEQ ID NO: 147), SGGGGSGGGG (SEQ ID NO: 148) and GGGGSGGGGSGGGG (SEQ ID NO: 149), but also include the sequences GSPGSSSSGS (SEQ ID NO:150), (G4S)₃ (SEQ ID NO:151), (G4S)₄ (SEQ ID NO:152), GSGSGSGS (SEQ ID NO:153), GSGSGNGS (SEQ ID NO:154), GGSGSGSG (SEQ ID NO:155), GGSGSG (SEQ ID NO:156), GGSG (SEQ ID NO:157), GGSGNGSG (SEQ ID NO:158), GGNGSGSG (SEQ ID NO:159) and GGNGSG (SEQ ID NO:160). Peptide linkers of particular interest are (G4S) (SEQ ID NO:146), (G₄S)₂ or GGGGSGGGGS (SEQ ID NO:147), (G4S)₃ (SEQ ID NO:151) and (G4S)₄ (SEQ ID NO: 152).

[0244] The term “amino acid” as used within this application denotes the group of naturally occurring carboxy a-amino acids comprising alanine (three letter code: ala, one letter code: A), arginine (arg, R), asparagine (asn, N), aspartic acid (asp, D), cysteine (cys, C), glutamine (gln, Q), glutamic acid (glu, E), glycine (gly, G), histidine (his, H), isoleucine (ile, I), leucine (leu, L), lysine (lys, K), methionine (met, M), phenylalanine (phe, F), proline (pro, P), serine (ser, S), threonine (thr, T), tryptophan (trp, W), tyrosine (tyr, Y), and valine (val, V).

[0245] By “fused” or “connected” is meant that the components (e.g. a polypeptide and an ectodomain of said TNF ligand family member) are linked by peptide bonds, either directly or via one or more peptide linkers.

[0246] “Percent (%) amino acid sequence identity” with respect to a reference polypeptide (protein) sequence is defined as the percentage of amino acid residues in a candidate sequence that are identical with the amino acid residues in the reference polypeptide sequence, after aligning the sequences and introducing gaps, if necessary, to achieve the maximum percent sequence identity, and not considering any conservative substitutions as part of the sequence identity. Alignment for purposes of determining percent amino acid sequence identity can be achieved in various ways that are within the skill in the art, for instance, using publicly available computer software such as BLAST, BLAST-2, ALIGN. SAWI or Megalign (DNASTAR) software. Those skilled in the art can determine appropriate parameters for aligning sequences, including any algorithms needed to achieve maximal alignment over the full length of the sequences being compared. For purposes herein, however, % amino acid sequence identity values are generated using the sequence comparison computer program ALIGN-2. The ALIGN-2 sequence comparison computer program was authored by Genentech, Inc., and the source code has been filed with user documentation in the U.S. Copyright Office, Washington D.C., 20559, where it is registered under U.S. Copyright Registration No. TXU510087. The ALIGN-2 program is publicly available from Genentech, Inc., South San Francisco, Calif., or may be compiled from the source code. The ALIGN-2 program should be compiled for use on a UNIX operating system, including digital UNIX V4.0D. All sequence comparison parameters are set by the ALIGN-2 program and do not vary. In situations where ALIGN-2 is employed for amino acid sequence comparisons, the % amino acid sequence identity of a given amino acid sequence A to, with, or against a given amino acid sequence B (which can alternatively be phrased as a given amino acid sequence A that has or comprises a certain % amino acid sequence identity to, with, or against a given amino acid sequence B) is calculated as follows: 100 times the fraction X/Y, where X is the number of amino acid residues scored as identical matches by the sequence alignment program ALIGN-2 in that program's alignment of A and B, and where Y is the total number of amino acid residues in B. It will be appreciated that where the length of amino acid sequence A is not equal to the length of amino acid sequence B, the % amino acid sequence identity of A to B will not equal the % amino acid sequence identity of B to A. Unless specifically stated otherwise, all % amino acid sequence identity values used herein are obtained as described in the immediately preceding paragraph using the ALIGN-2 computer program.

[0247] In certain embodiments, amino acid sequence variants of the CD28 antigen binding molecules provided herein are contemplated. For example, it may be desirable to improve the binding affinity and/or other biological properties of the CD28 antigen binding molecules.

[0248] Amino acid sequence variants of the CD28 antigen binding molecules may be prepared by introducing appropriate modifications into the nucleotide sequence encoding the molecules, or by peptide synthesis. Such modifications include, for example, deletions from, and/or insertions into and/or substitutions of residues within the amino acid sequences of the antibody. Any combination of deletion, insertion, and substitution can be made to arrive at the final construct, provided that the final construct possesses the desired characteristics, e.g., antigen-binding. Sites of interest for substitutional mutagenesis include the HVRs and Framework (FRs). Conservative substitutions are provided in Table B under the heading “Preferred Substitutions” and further described below in reference to amino acid side chain classes (1) to (6). Amino acid substitutions may be introduced into the molecule of interest and the products screened for a desired activity, e.g., retained/improved antigen binding, decreased immunogenicity, or improved ADCC or CDC.

TABLE A

| Original | | Preferred |
|---|---|---|
| Residue | Exemplary Substitutions | Substitutions |
| Ala (A) | Val; Leu; Ile | Val |
| Arg (R) | Lys; Gln; Asn | Lys |
| Asn (N) | Gln; His; Asp, Lys; Arg | Gln |
| Asp (D) | Glu; Asn | Glu |
| Cys (C) | Ser; Ala | Ser |
| Gln (Q) | Asn; Glu | Asn |
| Glu (E) | Asp; Gln | Asp |
| Gly (G) | Ala | Ala |
| His (H) | Asn; Gln; Lys; Arg | Arg |
| Ile (I) | Leu; Val; Met; Ala; Phe; Norleucine | Leu |
| Leu (L) | Norleucine; Ile; Val; Met; Ala; Phe | Ile |
| Lys (K) | Arg; Gln; Asn | Arg |
| Met (M) | Leu; Phe; Ile | Leu |
| Phe (F) | Trp; Leu; Val; Ile; Ala; Tyr | Tyr |
| Pro (P) | Ala | Ala |
| Ser (S) | Thr | Thr |
| Thr (T) | Val; Ser | Ser |
| Trp (W) | Tyr; Phe | Tyr |
| Tyr (Y) | Trp; Phe; Thr; Ser | Phe |
| Val (V) | Ile; Leu; Met; Phe; Ala; Norleucine | Leu |

[0249] Amino acids may be grouped according to common side-chain properties:
[0250] (1) hydrophobic: Norleucine, Met, Ala, Val, Leu, Ile;
[0251] (2) neutral hydrophilic: Cys, Ser, Thr, Asn, Gln;
[0252] (3) acidic: Asp, Glu;
[0253] (4) basic: His, Lys, Arg;
[0254] (5) residues that influence chain orientation: Gly, Pro;
[0255] (6) aromatic: Trp, Tyr, Phe.

[0256] Non-conservative substitutions will entail exchanging a member of one of these classes for another class.

[0257] The term “amino acid sequence variants” includes substantial variants wherein there are amino acid substitutions in one or more hypervariable region residues of a parent antigen binding molecule (e.g. a humanized or human antibody). Generally, the resulting variant(s) selected for further study will have modifications (e.g., improvements) in certain biological properties (e.g., increased affinity, reduced immunogenicity) relative to the parent antigen binding molecule and/or will have substantially retained certain biological properties of the parent antigen binding molecule. An exemplary substitutional variant is an affinity matured antibody, which may be conveniently generated, e.g., using phage display-based affinity maturation techniques such as those described herein. Briefly, one or more HVR residues are mutated and the variant antigen binding molecules displayed on phage and screened for a particular biological activity (e.g. binding affinity). In certain embodiments, substitutions, insertions, or deletions may occur within one or more HVRs so long as such alterations do not substantially reduce the ability of the antigen binding molecule to bind antigen. For example, conservative alterations (e.g., conservative substitutions as provided herein) that do not substantially reduce binding affinity may be made in HVRs. A useful method for identification of residues or regions of an antibody that may be targeted for mutagenesis is called “alanine scanning mutagenesis” as described by Cunningham and Wells (1989) Science, 244:1081-1085. In this method, a residue or group of target residues (e.g., charged residues such as Arg, Asp, His, Lys, and Glu) are identified and replaced by a neutral or negatively charged amino acid (e.g., alanine or polyalanine) to determine whether the interaction of the antibody with antigen is affected. Further substitutions may be introduced at the amino acid locations demonstrating functional sensitivity to the initial substitutions. Alternatively, or additionally, a crystal structure of an antigen-antigen binding molecule complex to identify contact points between the antibody and antigen. Such contact residues and neighboring residues may be targeted or eliminated as candidates for substitution. Variants may be screened to determine whether they contain the desired properties.

[0258] Amino acid sequence insertions include amino- and/or carboxyl-terminal fusions ranging in length from one residue to polypeptides containing a hundred or more residues, as well as intrasequence insertions of single or multiple amino acid residues. Examples of insertions include CD28 antigen binding molecules with a fusion to the N- or C-terminus to a polypeptide which increases the serum half-life of the CD28 antigen binding molecules.

[0259] In certain embodiments, the CD28 antigen binding molecules provided herein are altered to increase or decrease the extent to which the antibody is glycosylated. Glycosylation variants of the molecules may be conveniently obtained by altering the amino acid sequence such that one or more glycosylation sites is created or removed. Where the agonistic ICOS-binding molecule comprises an Fc domain, the carbohydrate attached thereto may be altered. Native antibodies produced by mammalian cells typically comprise a branched, biantennary oligosaccharide that is generally attached by an N-linkage to Asn297 of the CH2 domain of the Fc region. See, e.g., Wright et al. TIBTECH 15:26-32 (1997). The oligosaccharide may include various carbohydrates, e.g., mannose, N-acetyl glucosamine (GlcNAc), galactose, and sialic acid, as well as a fucose attached to a GlcNAc in the “stem” of the biantennary oligosaccharide structure. In some embodiments, modifications of the oligosaccharide in agonistic ICOS-binding molecules may be made in order to create variants with certain improved properties. In one aspect, variants of agonistic ICOS-binding molecules are provided having a carbohydrate structure that lacks fucose attached (directly or indirectly) to an Fc region. Such fucosylation variants may have improved ADCC function, see e.g. US Patent Publication Nos. US 2003/0157108 (Presta, L.) or US 2004/0093621 (Kyowa Hakko Kogyo Co., Ltd). Further variants of the CD28 antigen binding molecules of the invention include those with bisected oligosaccharides, e.g., in which a biantennary oligosaccharide attached to the Fc region is bisected by GlcNAc. Such variants may have reduced fucosylation and/or improved ADCC function., see for example WO 2003/011878 (Jean-Mairet et al.); U.S. Pat. No. 6,602,684 (Umana et al.); and US 2005/0123546 (Umana et al.). Variants with at least one galactose residue in the oligosaccharide attached to the Fc region are also provided. Such antibody variants may have improved CDC function and are described, e.g., in WO 1997/30087 (Patel et al.); WO 1998/58964 (Raju, S.); and WO 1999/22764 (Raju, S.).

[0260] In certain embodiments, it may be desirable to create cysteine engineered variants of the CD28 antigen binding molecules of the invention, e.g., “thioMAbs,” in which one or more residues of the molecule are substituted with cysteine residues. In particular embodiments, the substituted residues occur at accessible sites of the molecule. By substituting those residues with cysteine, reactive thiol groups are thereby positioned at accessible sites of the antibody and may be used to conjugate the antibody to other moieties, such as drug moieties or linker-drug moieties, to create an immunoconjugate. In certain embodiments, any one or more of the following residues may be substituted with cysteine: V205 (Kabat numbering) of the light chain; A118 (EU numbering) of the heavy chain; and S400 (EU numbering) of the heavy chain Fc region. Cysteine engineered antigen binding molecules may be generated as described, e.g., in U.S. Pat. No. 7,521,541.

[0261] In certain aspects, the CD28 antigen binding molecules provided herein may be further modified to contain additional non-proteinaceous moieties that are known in the art and readily available. The moieties suitable for derivatization of the antibody include but are not limited to water soluble polymers. Non-limiting examples of water soluble polymers include, but are not limited to, polyethylene glycol (PEG), copolymers of ethylene glycol/propylene glycol, carboxymethylcellulose, dextran, polyvinyl alcohol, polyvinyl pyrrolidone, poly-1, 3-dioxolane, poly-1,3,6-trioxane, ethylene/maleic anhydride copolymer, polyaminoacids (either homopolymers or random copolymers), and dextran or poly(n-vinyl pyrrolidone)polyethylene glycol, propropylene glycol homopolymers, prolypropylene oxide/ethylene oxide co-polymers, polyoxyethylated polyols (e.g., glycerol), polyvinyl alcohol, and mixtures thereof. Polyethylene glycol propionaldehyde may have advantages in manufacturing due to its stability in water. The polymer may be of any molecular weight, and may be branched or unbranched. The number of polymers attached to the antibody may vary, and if more than one polymer is attached, they can be the same or different molecules. In general, the number and/or type of polymers used for derivatization can be determined based on considerations including, but not limited to, the particular properties or functions of the antibody to be improved, whether the bispecific antibody derivative will be used in a therapy under defined conditions, etc. In another aspect, conjugates of an antibody and non-proteinaceous moiety that may be selectively heated by exposure to radiation are provided. In one embodiment, the non-proteinaceous moiety is a carbon nanotube (Kam, N. W. et al., Proc. Natl. Acad. Sci. USA 102 (2005) 11600-11605). The radiation may be of any wavelength, and includes, but is not limited to, wavelengths that do not harm ordinary cells, but which heat the non-proteinaceous moiety to a temperature at which cells proximal to the antibody-non-proteinaceous moiety are killed. In another aspect, immunoconjugates of the CD28 antigen binding molecules provided herein maybe obtained. An “immunoconjugate” is an antibody conjugated to one or more heterologous molecule(s), including but not limited to a cytotoxic agent.

[0262] The term “polynucleotide” refers to an isolated nucleic acid molecule or construct, e.g. messenger RNA (mRNA), virally-derived RNA, or plasmid DNA (pDNA). A polynucleotide may comprise a conventional phosphodiester bond or a non-conventional bond (e.g. an amide bond, such as found in peptide nucleic acids (PNA). The term “nucleic acid molecule” refers to any one or more nucleic acid segments, e.g. DNA or RNA fragments, present in a polynucleotide. Each nucleotide is composed of a base, specifically a purine- or pyrimidine base (i.e. cytosine (C), guanine (G), adenine (A), thymine (T) or uracil (U)), a sugar (i.e. deoxyribose or ribose), and a phosphate group. Often, the nucleic acid molecule is described by the sequence of bases, whereby said bases represent the primary structure (linear structure) of a nucleic acid molecule. The sequence of bases is typically represented from 5′ to 3′. Herein, the term nucleic acid molecule encompasses deoxyribonucleic acid (DNA) including e.g., complementary DNA (cDNA) and genomic DNA, ribonucleic acid (RNA), in particular messenger RNA (mRNA), synthetic forms of DNA or RNA, and mixed polymers comprising two or more of these molecules. The nucleic acid molecule may be linear or circular. In addition, the term nucleic acid molecule includes both, sense and antisense strands, as well as single stranded and double stranded forms. Moreover, the herein described nucleic acid molecule can contain naturally occurring or non-naturally occurring nucleotides. Examples of non-naturally occurring nucleotides include modified nucleotide bases with derivatized sugars or phosphate backbone linkages or chemically modified residues. Nucleic acid molecules also encompass DNA and RNA molecules which are suitable as a vector for direct expression of an antibody of the invention in vitro and/or in vivo, e.g., in a host or patient. Such DNA (e.g., cDNA) or RNA (e.g., mRNA) vectors, can be unmodified or modified. For example, mRNA can be chemically modified to enhance the stability of the RNA vector and/or expression of the encoded molecule so that mRNA can be injected into a subject to generate the antibody in vivo (see e.g., Stadler et al. (2017) Nature Medicine 23:815-817, or EP 2 101 823 B1).

[0263] By “isolated” nucleic acid molecule or polynucleotide is intended a nucleic acid molecule, DNA or RNA, which has been removed from its native environment. For example, a recombinant polynucleotide encoding a polypeptide contained in a vector is considered isolated for the purposes of the present invention. Further examples of an isolated polynucleotide include recombinant polynucleotides maintained in heterologous host cells or purified (partially or substantially) polynucleotides in solution. An isolated polynucleotide includes a polynucleotide molecule contained in cells that ordinarily contain the polynucleotide molecule, but the polynucleotide molecule is present extrachromosomally or at a chromosomal location that is different from its natural chromosomal location. Isolated RNA molecules include in vivo or in vitro RNA transcripts of the present invention, as well as positive and negative strand forms, and double-stranded forms. Isolated polynucleotides or nucleic acids according to the present invention further include such molecules produced synthetically. In addition, a polynucleotide or a nucleic acid may be or may include a regulatory element such as a promoter, ribosome binding site, or a transcription terminator.

[0264] By a nucleic acid or polynucleotide having a nucleotide sequence at least, for example, 95% “identical” to a reference nucleotide sequence of the present invention, it is intended that the nucleotide sequence of the polynucleotide is identical to the reference sequence except that the polynucleotide sequence may include up to five point mutations per each 100 nucleotides of the reference nucleotide sequence. In other words, to obtain a polynucleotide having a nucleotide sequence at least 95% identical to a reference nucleotide sequence, up to 5% of the nucleotides in the reference sequence may be deleted or substituted with another nucleotide, or a number of nucleotides up to 5% of the total nucleotides in the reference sequence may be inserted into the reference sequence. These alterations of the reference sequence may occur at the 5′ or 3′ terminal positions of the reference nucleotide sequence or anywhere between those terminal positions, interspersed either individually among residues in the reference sequence or in one or more contiguous groups within the reference sequence. As a practical matter, whether any particular polynucleotide sequence is at least 80%, 85%, 90%, 95%, 96%, 97%, 98% or 99% identical to a nucleotide sequence of the present invention can be determined conventionally using known computer programs, such as the ones discussed above for polypeptides (e.g. ALIGN-2).

[0265] The term “expression cassette” refers to a polynucleotide generated recombinantly or synthetically, with a series of specified nucleic acid elements that permit transcription of a particular nucleic acid in a target cell. The recombinant expression cassette can be incorporated into a plasmid, chromosome, mitochondrial DNA, plastid DNA, virus, or nucleic acid fragment.

[0266] Typically, the recombinant expression cassette portion of an expression vector includes, among other sequences, a nucleic acid sequence to be transcribed and a promoter. In certain embodiments, the expression cassette of the invention comprises polynucleotide sequences that encode bispecific antigen binding molecules of the invention or fragments thereof.

[0267] The term “vector” or “expression vector” is synonymous with “expression construct” and refers to a DNA molecule that is used to introduce and direct the expression of a specific gene to which it is operably associated in a target cell. The term includes the vector as a self-replicating nucleic acid structure as well as the vector incorporated into the genome of a host cell into which it has been introduced. The expression vector of the present invention comprises an expression cassette. Expression vectors allow transcription of large amounts of stable mRNA. Once the expression vector is inside the target cell, the ribonucleic acid molecule or protein that is encoded by the gene is produced by the cellular transcription and/or translation machinery. In one embodiment, the expression vector of the invention comprises an expression cassette that comprises polynucleotide sequences that encode bispecific antigen binding molecules of the invention or fragments thereof.

[0268] The terms “host cell”, “host cell line,” and “host cell culture” are used interchangeably and refer to cells into which exogenous nucleic acid has been introduced, including the progeny of such cells. Host cells include “transformants” and “transformed cells,” which include the primary transformed cell and progeny derived therefrom without regard to the number of passages.

[0269] Progeny may not be completely identical in nucleic acid content to a parent cell, but may contain mutations. Mutant progeny that have the same function or biological activity as screened or selected for in the originally transformed cell are included herein. A host cell is any type of cellular system that can be used to generate the bispecific antigen binding molecules of the present invention. Host cells include cultured cells, e.g. mammalian cultured cells, such as CHO cells, BHK cells, NS0 cells, SP2/0 cells, YO myeloma cells, P3X63 mouse myeloma cells, PER cells, PER.C6 cells or hybridoma cells, yeast cells, insect cells, and plant cells, to name only a few, but also cells comprised within a transgenic animal, transgenic plant or cultured plant or animal tissue.

[0270] An “effective amount” of an agent refers to the amount that is necessary to result in a physiological change in the cell or tissue to which it is administered.

[0271] A “therapeutically effective amount” of an agent, e.g. a pharmaceutical composition, refers to an amount effective, at dosages and for periods of time necessary, to achieve the desired therapeutic or prophylactic result. A therapeutically effective amount of an agent for example eliminates, decreases, delays, minimizes or prevents adverse effects of a disease.

[0272] An “individual” or “subject” is a mammal. Mammals include, but are not limited to, domesticated animals (e.g. cows, sheep, cats, dogs, and horses), primates (e.g. humans and non-human primates such as monkeys), rabbits, and rodents (e.g. mice and rats). Particularly, the individual or subject is a human.

[0273] The term “pharmaceutical composition” refers to a preparation which is in such form as to permit the biological activity of an active ingredient contained therein to be effective, and which contains no additional components which are unacceptably toxic to a subject to which the formulation would be administered.

[0274] A “pharmaceutically acceptable excipient” refers to an ingredient in a pharmaceutical composition, other than an active ingredient, which is nontoxic to a subject. A pharmaceutically acceptable excipient includes, but is not limited to, a buffer, a stabilizer, or a preservative.

[0275] The term “package insert” is used to refer to instructions customarily included in commercial packages of therapeutic products, that contain information about the indications, usage, dosage, administration, combination therapy, contraindications and/or warnings concerning the use of such therapeutic products.

[0276] As used herein, “treatment” (and grammatical variations thereof such as “treat” or “treating”) refers to clinical intervention in an attempt to alter the natural course of the individual being treated, and can be performed either for prophylaxis or during the course of clinical pathology. Desirable effects of treatment include, but are not limited to, preventing occurrence or recurrence of disease, alleviation of symptoms, diminishment of any direct or indirect pathological consequences of the disease, preventing metastasis, decreasing the rate of disease progression, amelioration or palliation of the disease state, and remission or improved prognosis.

[0277] In some embodiments, the molecules of the invention are used to delay development of a disease or to slow the progression of a disease.

[0278] The term “combination treatment” or “co-administration” as noted herein encompasses combined administration (where two or more therapeutic agents are included in the same or separate formulations), and separate administration, in which case, administration of an antibody as reported herein can occur prior to, simultaneously, and/or following, administration of the additional therapeutic agent or agents, preferably an antibody or antibodies.

[0279] By “B cell proliferative disorder” is meant a disease wherein the number of B cells in a patient is increased as compared to the number of B cells in a healthy subject, and particularly wherein the increase in the number of B cells is the cause or hallmark of the disease.

[0280] The term “hematological cancer” refers to or describes the physiological condition in mammals that is typically characterized by unregulated cell growth/proliferation. Thus, the term cancer as used herein refers to proliferative diseases, such as carcinoma, lymphomas (e.g., Hodgkin's and non-Hodgkin's lymphoma), blastoma, sarcoma, and leukemia. In particular, the term cancer refers to a B-cell proliferative disorder. In one aspect, the cancer is selected from the group consisting of Non-Hodgkin lymphoma (NHL), acute lymphocytic leukemia (ALL), chronic lymphocytic leukemia (CLL), diffuse large B-cell lymphoma (DLBCL), follicular lymphoma (FL), mantle-cell lymphoma (MCL), marginal zone lymphoma (MZL), Multiple myeloma (MM), and Hodgkin lymphoma (HL).

[0281] The term “cancer” refers to or describes the physiological condition in mammals that is typically characterized by unregulated cell growth/proliferation. Thus, the term cancer as used herein refers to proliferative diseases, such as carcinoma, lymphomas (e.g., Hodgkin's and non-Hodgkin's lymphoma), blastoma, sarcoma, and leukemia. In particular, the term cancer includes lymphocytic leukemias, lung cancer, non-small cell lung (NSCL) cancer, bronchioloalviolar cell lung cancer, bone cancer, pancreatic cancer, skin cancer, cancer of the head or neck, cutaneous or intraocular melanoma, uterine cancer, ovarian cancer, rectal cancer, cancer of the anal region, stomach cancer, gastric cancer, colon cancer, breast cancer, uterine cancer, carcinoma of the fallopian tubes, carcinoma of the endometrium, carcinoma of the cervix, carcinoma of the vagina, carcinoma of the vulva, Hodgkin's Disease, cancer of the esophagus, cancer of the small intestine, cancer of the endocrine system, cancer of the thyroid gland, cancer of the parathyroid gland, cancer of the adrenal gland, sarcoma of soft tissue, cancer of the urethra, cancer of the penis, prostate cancer, cancer of the bladder, cancer of the kidney or ureter, renal cell carcinoma, carcinoma of the renal pelvis, mesothelioma, hepatocellular cancer, biliary cancer, neoplasms of the central nervous system (CNS), spinal axis tumors, brain stem glioma, glioblastoma multiforme, astrocytomas, schwanomas, ependymonas, medulloblastomas, meningiomas, squamous cell carcinomas, pituitary adenoma and Ewings sarcoma, including refractory versions of any of the above cancers, or a combination of one or more of the above cancers. In one aspect, the cancer is a solid tumor. In another aspect, the cancer is a haematological cancer, particularly leukemia, most particularly acute lymphoblastic leukemia (ALL) or acute myelogenous leukemia (AML).

[0282] Bispecific agonistic CD28 antigen binding molecules of the invention The invention provides novel bispecific agonistic CD28 antigen binding molecules with particularly advantageous properties such as producibility, stability, binding affinity, biological activity, targeting efficiency, reduced toxicity, an extended dosage range that can be given to a patient and thereby a possibly enhanced efficacy. The novel bispecific agonistic CD28 antigen binding molecules comprise an Fc domain composed of a first and a second subunit capable of stable association comprising one or more amino acid substitution that reduces the binding affinity of the antigen binding molecule to an Fc receptor and/or effector function (Fc silent) and thus unspecific cross-linking via Fc receptors is avoided. Instead, they comprise at least one antigen binding domain capable of specific binding to a tumor-associated antigen such as Fibroblast Activation Protein (FAP) or Carcinoembryonic Antigen (CEA) which causes cross-linking at the tumor site. Thus, tumor-specific T cell activation is achieved.

[0283] Herein provided is a bispecific agonistic CD28 antigen binding molecule with monovalent binding to CD28, comprising

(a) one antigen binding domains capable of specific binding to CD28,
(b) at least one antigen binding domain capable of specific binding to a tumor-associated antigen, and
(c) an Fc domain composed of a first and a second subunit capable of stable association comprising one or more amino acid substitution that reduces the binding affinity of the antigen binding molecule to an Fc receptor and/or effector function.

[0284] In one aspect, a bispecific agonistic CD28 antigen binding molecule as defined herein before is provided, wherein the Fc domain is an IgG, particularly an IgG1 Fc domain or an IgG4 Fc domain. In one particular aspect, the Fc domain composed of a first and a second subunit capable of stable association is an IgG1 Fc domain. The Fc domain comprises one or more amino acid substitution that reduces the binding affinity of the antigen binding molecule to an Fc receptor and/or reduces or abolishes effector function. In one aspect, the Fc domain comprises the amino acid substitutions L234A and L235A (numbering according to Kabat EU index). In one aspect, the Fc domain is of human IgG1 subclass and comprises the amino acid mutations L234A, L235A and P329G (numbering according to Kabat EU index). In one aspect, a bispecific agonistic CD28 antigen binding molecule is provided, wherein the antigen binding molecule comprises an Fc domain composed of a first and a second subunit capable of stable association, wherein the first subunit comprises the amino acid sequence of SEQ ID NO: 176 and the second subunit comprise the amino acid sequence of SEQ ID NO: 177.

[0285] In one aspect, provided is a bispecific agonistic CD28 antigen binding molecule as defined herein before, wherein the antigen binding domain capable of specific binding to CD28 comprises

(i) a heavy chain variable region (V_{H}CD28) comprising a heavy chain complementary determining region CDR-H1 of SEQ ID NO: 20, a CDR-H2 of SEQ ID NO: 21, and a CDR-H3 of SEQ ID NO: 22, and a light chain variable region (V_{L}CD28) comprising a light chain complementary determining region CDR-L1 of SEQ ID NO: 23, a CDR-L2 of SEQ ID NO: 24 and a CDR-L3 of SEQ ID NO: 25; or
(ii) a heavy chain variable region (V_{H}CD28) comprising a CDR-H1 of SEQ ID NO: 36, a CDR-H2 of SEQ ID NO: 37, and a CDR-H3 of SEQ ID NO: 38, and a light chain variable region (V_{L}CD28) comprising a CDR-L1 of SEQ ID NO: 39, a CDR-L2 of SEQ ID NO: 40 and a CDR-L3 of SEQ ID NO: 41.

[0286] In one aspect, the antigen binding domain capable of specific binding to CD28 of the bispecific agonistic CD28 antigen binding molecule comprises a heavy chain variable region (V_{H}CD28) comprising a CDR-H1 of SEQ ID NO: 36, a CDR-H2 of SEQ ID NO: 37, and a CDR-H3 of SEQ ID NO: 38, and a light chain variable region (V_{L}CD28) comprising a CDR-L1 of SEQ ID NO: 39, a CDR-L2 of SEQ ID NO: 40 and a CDR-L3 of SEQ ID NO: 41.

[0287] In another aspect, the antigen binding domain capable of specific binding to CD28 of the bispecific agonistic CD28 antigen binding molecule comprises a heavy chain variable region (V_{H}CD28) comprising a CDR-H1 of SEQ ID NO: 20, a CDR-H2 of SEQ ID NO: 21, and a CDR-H3 of SEQ ID NO: 22, and a light chain variable region (V_{L}CD28) comprising a CDR-L1 of SEQ ID NO: 23, a CDR-L2 of SEQ ID NO: 24 and a CDR-L3 of SEQ ID NO: 25.

[0288] Furthermore, provided is a bispecific agonistic CD28 antigen binding molecule as defined herein before, wherein the antigen binding domain capable of specific binding to CD28 comprises a heavy chain variable region (V_{H}CD28) comprising an amino acid sequence that is at least about 95%, 96%, 97%, 98%, 99% or 100% identical to the amino acid sequence of SEQ ID NO:26, and a light chain variable region (V_{L}CD28) comprising an amino acid sequence that is at least about 95%, 96%, 97%, 98%, 99% or 100% identical to the amino acid sequence of SEQ ID NO:27.

[0289] In another aspect, provided is bispecific agonistic CD28 antigen binding molecule, wherein the antigen binding domain capable of specific binding to CD28 comprises

[0290] (a) the CDRs of the heavy chain variable region (V_{H}CD28) comprising the amino acid sequence of SEQ ID NO:47 and the CDRs of the light chain variable region (V_{L}CD28) comprising the amino acid sequence of SEQ ID NO:54, or

[0291] (b) the CDRs of the heavy chain variable region (V_{H}CD28) comprising the amino acid sequence of SEQ ID NO:47 and the CDRs of the light chain variable region (V_{L}CD28) comprising the amino acid sequence of SEQ ID NO:27, or

[0292] (c) the CDRs of the heavy chain variable region (V_{H}CD28) comprising the amino acid sequence of SEQ ID NO:51 and the CDRs of the light chain variable region (V_{L}CD28) comprising the amino acid sequence of SEQ ID NO:61, or

[0293] (d) the CDRs of the heavy chain variable region (V_{H}CD28) comprising the amino acid sequence of SEQ ID NO:46 and the CDRs of the light chain variable region (V_{L}CD28) comprising the amino acid sequence of SEQ ID NO:53, or

[0294] (e) the CDRs of the heavy chain variable region (V_{H}CD28) comprising the amino acid sequence of SEQ ID NO:46 and the CDRs of the light chain variable region (V_{L}CD28) comprising the amino acid sequence of SEQ ID NO:54, or

[0295] (f) the CDRs of the heavy chain variable region (V_{H}CD28) comprising the amino acid sequence of SEQ ID NO:46 and the CDRs of the light chain variable region (V_{L}CD28) comprising the amino acid sequence of SEQ ID NO:59, or

[0296] (g) the CDRs of the heavy chain variable region (V_{H}CD28) comprising the amino acid sequence of SEQ ID NO:46 and the CDRs of the light chain variable region (V_{L}CD28) comprising the amino acid sequence of SEQ ID NO:27, or

[0297] (h) the CDRs of the heavy chain variable region (V_{H}CD28) comprising the amino acid sequence of SEQ ID NO:43 and the CDRs of the light chain variable region (V_{L}CD28) comprising the amino acid sequence of SEQ ID NO:27, or

[0298] (i) the CDRs of the heavy chain variable region (V_{H}CD28) comprising the amino acid sequence of SEQ ID NO:42 and the CDRs of the light chain variable region (V_{L}CD28) comprising the amino acid sequence of SEQ ID NO:53, or

[0299] (j) the CDRs of the heavy chain variable region (V_{H}CD28) comprising the amino acid sequence of SEQ ID NO:42 and the CDRs of the light chain variable region (V_{L}CD28) comprising the amino acid sequence of SEQ ID NO:59, or

[0300] (k) the CDRs of the heavy chain variable region (V_{H}CD28) comprising the amino acid sequence of SEQ ID NO:42 and the CDRs of the light chain variable region (V_{L}CD28) comprising the amino acid sequence of SEQ ID NO:27.

[0301] In one aspect, provided is a bispecific agonistic CD28 antigen binding molecule, wherein the antigen binding domain capable of specific binding to CD28 comprises the CDRs of the heavy chain variable region (V_{H}CD28) comprising the amino acid sequence of SEQ ID NO:47 and the CDRs of the light chain variable region (V_{L}CD28) comprising the amino acid sequence of SEQ ID NO:54. In another aspect, the antigen binding domain capable of specific binding to CD28 of the bispecific agonistic CD28 antigen binding molecule comprises a heavy chain variable region (V_{H}CD28) comprising a CDR-H1 of SEQ ID NO: 489, a CDR-H2 of SEQ ID NO: 490, and a CDR-H3 of SEQ ID NO: 491, and a light chain variable region (V_{L}CD28) comprising a CDR-L1 of SEQ ID NO: 492, a CDR-L2 of SEQ ID NO: 493 and a CDR-L3 of SEQ ID NO: 494.

[0302] In another aspect, provided is a bispecific agonistic CD28 antigen binding molecule, wherein the antigen binding domain capable of specific binding to CD28 comprises the CDRs of the heavy chain variable region (V_{H}CD28) comprising the amino acid sequence of SEQ ID NO:46 and the CDRs of the light chain variable region (V_{L}CD28) comprising the amino acid sequence of SEQ ID NO:53. In another aspect, the antigen binding domain capable of specific binding to CD28 of the bispecific agonistic CD28 antigen binding molecule comprises a heavy chain variable region (V_{H}CD28) comprising a CDR-H1 of SEQ ID NO: 495, a CDR-H2 of SEQ ID NO: 496, and a CDR-H3 of SEQ ID NO: 497, and a light chain variable region (V_{L}CD28) comprising a CDR-L1 of SEQ ID NO: 498, a CDR-L2 of SEQ ID NO: 499 and a CDR-L3 of SEQ ID NO: 500.

[0303] In another aspect, provided is a bispecific agonistic CD28 antigen binding molecule, wherein the antigen binding domain capable of specific binding to CD28 comprises the CDRs of the heavy chain variable region (V_{H}CD28) comprising the amino acid sequence of SEQ ID NO:42 and the CDRs of the light chain variable region (V_{L}CD28) comprising the amino acid sequence of SEQ ID NO:27. In another aspect, the antigen binding domain capable of specific binding to CD28 of the bispecific agonistic CD28 antigen binding molecule comprises a heavy chain variable region (V_{H}CD28) comprising a CDR-H1 of SEQ ID NO: 501, a CDR-H2 of SEQ ID NO: 502, and a CDR-H3 of SEQ ID NO: 503, and a light chain variable region (V_{L}CD28) comprising a CDR-L1 of SEQ ID NO: 504, a CDR-L2 of SEQ ID NO: 505 and a CDR-L3 of SEQ ID NO: 506.

[0304] In a further aspect, a bispecific agonistic CD28 antigen binding molecule is provided, wherein the antigen binding domain capable of specific binding to CD28 comprises a heavy chain variable region (V_{H}CD28) comprising an amino acid sequence selected from the group consisting of SEQ ID NO:42, SEQ ID NO:43, SEQ ID NO:44, SEQ ID NO:45, SEQ ID NO:46, SEQ ID NO:47, SEQ ID NO:48, SEQ ID NO:49, SEQ ID NO:50 and SEQ ID NO:51, and a light chain variable region (V_{L}CD28) comprising an amino acid sequence selected from the group consisting of SEQ ID NO:27, SEQ ID NO:52, SEQ ID NO:53, SEQ ID NO:54, SEQ ID NO:55, SEQ ID NO:56, SEQ ID NO:57, SEQ ID NO:58, SEQ ID NO:59, SEQ ID NO:60 and SEQ ID NO:61.

[0305] In another aspect, provided is bispecific agonistic CD28 antigen binding molecule, wherein the antigen binding domain capable of specific binding to CD28 comprises

[0306] (a) a heavy chain variable region (V_{H}CD28) comprising the amino acid sequence of SEQ ID NO:47 and a light chain variable region (V_{L}CD28) comprising the amino acid sequence of SEQ ID NO:54, or

[0307] (b) a heavy chain variable region (V_{H}CD28) comprising the amino acid sequence of SEQ ID NO:47 and a light chain variable region (V_{L}CD28) comprising the amino acid sequence of SEQ ID NO:27, or

[0308] (c) a heavy chain variable region (V_{H}CD28) comprising the amino acid sequence of SEQ ID NO:51 and a light chain variable region (V_{L}CD28) comprising the amino acid sequence of SEQ ID NO:61, or

[0309] (d) a heavy chain variable region (V_{H}CD28) comprising the amino acid sequence of SEQ ID NO:46 and a light chain variable region (V_{L}CD28) comprising the amino acid sequence of SEQ ID NO:53, or

[0310] (e) a heavy chain variable region (V_{H}CD28) comprising the amino acid sequence of SEQ ID NO:46 and a light chain variable region (V_{L}CD28) comprising the amino acid sequence of SEQ ID NO:54, or

[0311] (f) a heavy chain variable region (V_{H}CD28) comprising the amino acid sequence of SEQ ID NO:46 and a light chain variable region (V_{L}CD28) comprising the amino acid sequence of SEQ ID NO:59, or

[0312] (g) a heavy chain variable region (V_{H}CD28) comprising the amino acid sequence of SEQ ID NO:46 and a light chain variable region (V_{L}CD28) comprising the amino acid sequence of SEQ ID NO:27, or

[0313] (h) a heavy chain variable region (V_{H}CD28) comprising the amino acid sequence of SEQ ID NO:43 and a light chain variable region (V_{L}CD28) comprising the amino acid sequence of SEQ ID NO:27, or

[0314] (i) a heavy chain variable region (V_{H}CD28) comprising the amino acid sequence of SEQ ID NO:42 and a light chain variable region (V_{L}CD28) comprising the amino acid sequence of SEQ ID NO:53, or

[0315] (j) a heavy chain variable region (V_{H}CD28) comprising the amino acid sequence of SEQ ID NO:42 and a light chain variable region (V_{L}CD28) comprising the amino acid sequence of SEQ ID NO:59, or

[0316] (k) a heavy chain variable region (V_{H}CD28) comprising the amino acid sequence of SEQ ID NO:42 and a light chain variable region (V_{L}CD28) comprising the amino acid sequence of SEQ ID NO:27.

[0317] In one aspect, a bispecific agonistic CD28 antigen binding molecule is provided, wherein the antigen binding domain capable of specific binding to CD28 binds to CD28 with an reduced affinity compared to an antigen binding domain comprising a heavy chain variable region (V_{H}CD28) comprising the amino acid sequence of SEQ ID NO:26 and a light chain variable region (V_{L}CD28) comprising the amino acid sequence of SEQ ID NO:27. The affinity is measured by flow cytometry as binding to CHO cells expressing CD28. In one aspect, the antigen binding domain capable of specific binding to CD28 binds to CD28 with an reduced affinity compared to an antigen binding domain comprising a heavy chain variable region (V_{H}CD28) comprising the amino acid sequence of SEQ ID NO:26 and a light chain variable region (V_{L}CD28) comprising the amino acid sequence of SEQ ID NO:27 comprises the CDR-H1, CDR-H2 and CDR-H3 of the heavy chain variable region (V_{H}CD28) comprising the amino acid sequence of SEQ ID NO:47 and the CDR-L1, CDR-L2 and CDR-L3 of the light chain variable region (V_{L}CD28) comprising the amino acid sequence of SEQ ID NO:54. In one aspect, the antigen binding domain capable of specific binding to CD28 with reduced affinity compared to an antigen binding domain comprising a heavy chain variable region (V_{H}CD28) comprising the amino acid sequence of SEQ ID NO:26 and a light chain variable region (V_{L}CD28) comprising the amino acid sequence of SEQ ID NO:27 comprises a heavy chain variable region (V_{H}CD28) comprising an amino acid sequence that is at least about 95%, 96%, 97%, 98%, 99% or 100% identical to the amino acid sequence of SEQ ID NO:47, and a light chain variable region (V_{L}CD28) comprising an amino acid sequence that is at least about 95%, 96%, 97%, 98%, 99% or 100% identical to the amino acid sequence of SEQ ID NO:54.

[0318] In one particular aspect, a bispecific agonistic CD28 antigen binding molecule is provided, wherein the antigen binding domain capable of specific binding to CD28 comprises a heavy chain variable region (V_{H}CD28) comprising the amino acid sequence of SEQ ID NO:47 and a light chain variable region (V_{L}CD28) comprising the amino acid sequence of SEQ ID NO:54.

[0319] In another particular aspect, a bispecific agonistic CD28 antigen binding molecule is provided, wherein the antigen binding domain capable of specific binding to CD28 comprises a heavy chain variable region (V_{H}CD28) comprising the amino acid sequence of SEQ ID NO:46 and a light chain variable region (V_{L}CD28) comprising the amino acid sequence of SEQ ID NO:53.

[0320] In further particular aspect, a bispecific agonistic CD28 antigen binding molecule is provided, wherein the antigen binding domain capable of specific binding to CD28 comprises a heavy chain variable region (V_{H}CD28) comprising the amino acid sequence of SEQ ID NO:42 and a light chain variable region (V_{L}CD28) comprising the amino acid sequence of SEQ ID NO:27.

[0321] CEA-Targeting Bispecific Agonistic CD28 Antigen Binding Molecules

[0322] In one aspect, a bispecific agonistic CD28 antigen binding molecule is provided, wherein the antigen binding domain capable of specific binding to a tumor-associated antigen is an antigen binding domain capable of specific binding to Carcinoembryonic Antigen (CEA).

[0323] In one aspect, provided is a bispecific agonistic CD28 antigen binding molecule as described herein, wherein the antigen binding domain capable of specific binding to CEA comprises

(i) a heavy chain variable region (V_{H}CEA) comprising a CDR-H1 comprising the amino acid sequence of SEQ ID NO: 188, a CDR-H2 comprising the amino acid sequence of SEQ ID NO:189, and a CDR-H3 comprising the amino acid sequence of SEQ ID NO:190, and a light chain variable region (V_{L}CEA) comprising a CDR-L1 comprising the amino acid sequence of SEQ ID NO: 191, a CDR-L2 comprising the amino acid sequence of SEQ ID NO: 192, and a CDR-L3 comprising the amino acid sequence of SEQ ID NO: 193; or
(ii) a heavy chain variable region (V_{H}CEA) comprising a CDR-H1 comprising the amino acid sequence of SEQ ID NO: 180, a CDR-H2 comprising the amino acid sequence of SEQ ID NO: 181, and a CDR-H3 comprising the amino acid sequence of SEQ ID NO: 182, and a light chain variable region (V_{L}CEA) comprising a CDR-L1 comprising the amino acid sequence of SEQ ID NO: 183, a CDR-L2 comprising the amino acid sequence of SEQ ID NO: 184, and a CDR-L3 comprising the amino acid sequence of SEQ ID NO: 185; or
(iii) a heavy chain variable region (V_{H}CEA) comprising a CDR-H1 comprising the amino acid sequence of SEQ ID NO: 127, a CDR-H2 comprising the amino acid sequence of SEQ ID NO: 128, and a CDR-H3 comprising the amino acid sequence of SEQ ID NO: 129, and a light chain variable region (V_{L}CEA) comprising a CDR-L1 comprising the amino acid sequence of SEQ ID NO: 130, a CDR-L2 comprising the amino acid sequence of SEQ ID NO: 131, and a CDR-L3 comprising the amino acid sequence of SEQ ID NO: 132, or
(iv) a heavy chain variable region (V_{H}CEA) comprising a CDR-H1 comprising the amino acid sequence of SEQ ID NO:507, a CDR-H2 comprising the amino acid sequence of SEQ ID NO:508, and a CDR-H3 comprising the amino acid sequence of SEQ ID NO:509, and a light chain variable region (V_{L}CEA) comprising a CDR-L1 comprising the amino acid sequence of SEQ ID NO:510, a CDR-L2 comprising the amino acid sequence of SEQ ID NO:511, and a CDR-L3 comprising the amino acid sequence of SEQ ID NO:512.

[0324] In one particular aspect, the antigen binding domain capable of specific binding to CEA comprises a heavy chain variable region (V_{H}CEA) comprising a CDR-H1 comprising the amino acid sequence of SEQ ID NO: 188, a CDR-H2 comprising the amino acid sequence of SEQ ID NO: 189, and a CDR-H3 comprising the amino acid sequence of SEQ ID NO: 190, and a light chain variable region (V_{L}CEA) comprising a CDR-L1 comprising the amino acid sequence of SEQ ID NO: 191, a CDR-L2 comprising the amino acid sequence of SEQ ID NO: 192, and a CDR-L3 comprising the amino acid sequence of SEQ ID NO: 193.

[0325] Particularly, the antigen binding domain capable of specific binding to CEA comprises a heavy chain variable region (V_{H}CEA) comprising an amino acid sequence that is at least about 95%, 96%, 97%, 98%, 99% or 100% identical to the amino acid sequence of SEQ ID NO: 133, and a light chain variable region (V_{L}CEA) comprising an amino acid sequence that is at least about 95%, 96%, 97%, 98%, 99% or 100% identical to the amino acid sequence of SEQ ID NO: 134. In one aspect, the antigen binding domain capable of specific binding to CEA comprises a heavy chain variable region (V_{H}CEA) comprising an amino acid sequence of SEQ ID NO: 133, and a light chain variable region (V_{L}CEA) comprising the amino acid sequence of SEQ ID NO:134.

[0326] In another aspect, the antigen binding domain capable of specific binding to CEA comprises a heavy chain variable region (V_{H}CEA) comprising an amino acid sequence that is at least about 95%, 96%, 97%, 98%, 99% or 100% identical to the amino acid sequence of SEQ ID NO:186, and a light chain variable region (V_{L}CEA) comprising an amino acid sequence that is at least about 95%, 96%, 97%, 98%, 99% or 100% identical to the amino acid sequence of SEQ ID NO:187. In one aspect, the antigen binding domain capable of specific binding to CEA comprises a heavy chain variable region (V_{H}CEA) comprising an amino acid sequence of SEQ ID NO:186, and a light chain variable region (V_{L}CEA) comprising the amino acid sequence of SEQ ID NO:187.

[0327] In another aspect, the antigen binding domain capable of specific binding to CEA comprises a heavy chain variable region (V_{H}CEA) comprising an amino acid sequence that is at least about 95%, 96%, 97%, 98%, 99% or 100% identical to the amino acid sequence of SEQ ID NO:513, and a light chain variable region (V_{L}CEA) comprising an amino acid sequence that is at least about 95%, 96%, 97%, 98%, 99% or 100% identical to the amino acid sequence of SEQ ID NO:514. In one aspect, the antigen binding domain capable of specific binding to CEA comprises a heavy chain variable region (V_{H}CEA) comprising an amino acid sequence of SEQ ID NO:513, and a light chain variable region (V_{L}CEA) comprising the amino acid sequence of SEQ ID NO:514.

[0328] In another aspect, provided is a bispecific agonistic CD28 antigen binding molecule, wherein the antigen binding domain capable of specific binding to CEA comprises

[0329] (a) a heavy chain variable region (V_{H}CEA) comprising the amino acid sequence of SEQ ID NO: 194 and a light chain variable region (V_{L}CEA) comprising the amino acid sequence of SEQ ID NO:195, or

[0330] (b) a heavy chain variable region (V_{H}CEA) comprising the amino acid sequence of SEQ ID NO: 196 and a light chain variable region (V_{L}CEA) comprising the amino acid sequence of SEQ ID NO:197, or

[0331] (c) a heavy chain variable region (V_{H}CEA) comprising the amino acid sequence of SEQ ID NO: 198 and a light chain variable region (V_{L}CEA) comprising the amino acid sequence of SEQ ID NO: 199, or

[0332] (d) a heavy chain variable region (V_{H}CEA) comprising the amino acid sequence of SEQ ID NO:200 and a light chain variable region (V_{L}CEA) comprising the amino acid sequence of SEQ ID NO:201, or

[0333] (e) a heavy chain variable region (V_{H}CEA) comprising the amino acid sequence of SEQ ID NO:202 and a light chain variable region (V_{L}CEA) comprising the amino acid sequence of SEQ ID NO:203, or

[0334] (f) a heavy chain variable region (V_{H}CEA) comprising the amino acid sequence of SEQ ID NO:204 and a light chain variable region (V_{L}CEA) comprising the amino acid sequence of SEQ ID NO:205, or

[0335] (g) a heavy chain variable region (V_{H}CEA) comprising the amino acid sequence of SEQ ID NO:206 and a light chain variable region (V_{L}CEA) comprising the amino acid sequence of SEQ ID NO:207, or

[0336] (h) a heavy chain variable region (V_{H}CEA) comprising the amino acid sequence of SEQ ID NO:208 and a light chain variable region (V_{L}CEA) comprising the amino acid sequence of SEQ ID NO:209, or

[0337] (i) a heavy chain variable region (V_{H}CEA) comprising the amino acid sequence of SEQ ID NO:210 and a light chain variable region (V_{L}CEA) comprising the amino acid sequence of SEQ ID NO:211, or

[0338] (j) a heavy chain variable region (V_{H}CEA) comprising the amino acid sequence of SEQ ID NO:212 and a light chain variable region (V_{L}CEA) comprising the amino acid sequence of SEQ ID NO:213.

[0339] Particularly, the antigen binding domain capable of specific binding to CEA comprises a heavy chain variable region (V_{H}CEA) comprising the amino acid sequence of SEQ ID NO:200 and a light chain variable region (V_{L}CEA) comprising the amino acid sequence of SEQ ID NO:201.

[0340] FAP-Targeting Bispecific Agonistic CD28 Antigen Binding Molecules

[0341] In another aspect, a bispecific agonistic CD28 antigen binding molecule is provided, wherein the antigen binding domain capable of specific binding to a tumor-associated antigen is an antigen binding domain capable of specific binding to Fibroblast Activation Protein (FAP).

[0342] In one aspect, provided is a bispecific agonistic CD28 antigen binding molecule as described herein, wherein the antigen binding domain capable of specific binding to FAP comprises

(a) a heavy chain variable region (V_{H}FAP) comprising (i) CDR-H1 comprising the amino acid sequence of SEQ ID NO: 12, (ii) CDR-H2 comprising the amino acid sequence of SEQ ID NO: 13, and (iii) CDR-H3 comprising the amino acid sequence of SEQ ID NO: 14, and a light chain variable region (V_{L}FAP) comprising (iv) CDR-L1 comprising the amino acid sequence of SEQ ID NO: 15, (v) CDR-L2 comprising the amino acid sequence of SEQ ID NO: 16, and (vi) CDR-L3 comprising the amino acid sequence of SEQ ID NO: 17, or
(b) a heavy chain variable region (V_{H}FAP) comprising (i) CDR-H1 comprising the amino acid sequence of SEQ ID NO:4, (ii) CDR-H2 comprising the amino acid sequence of SEQ ID NO:5, and (iii) CDR-H3 comprising the amino acid sequence of SEQ ID NO:6, and a light chain variable region (V_{L}FAP) comprising (iv) CDR-L1 comprising the amino acid sequence of SEQ ID NO:7, (v) CDR-L2 comprising the amino acid sequence of SEQ ID NO:8, and (vi) CDR-L3 comprising the amino acid sequence of SEQ ID NO:9.

[0343] In particular, the antigen binding domain capable of specific binding to FAP comprises a heavy chain variable region (V_{H}FAP) comprising (i) CDR-H1 comprising the amino acid sequence of SEQ ID NO: 12, (ii) CDR-H2 comprising the amino acid sequence of SEQ ID NO: 13, and (iii) CDR-H3 comprising the amino acid sequence of SEQ ID NO: 14, and a light chain variable region (V_{L}FAP) comprising (iv) CDR-L1 comprising the amino acid sequence of SEQ ID NO: 15, (v) CDR-L2 comprising the amino acid sequence of SEQ ID NO: 16, and (vi) CDR-L3 comprising the amino acid sequence of SEQ ID NO: 17. In one aspect, a bispecific agonistic CD28 antigen binding molecule is provided, wherein the antigen binding domain capable of specific binding to FAP comprises (a) a heavy chain variable region (V_{H}FAP) comprising an amino acid sequence that is at least about 95%, 96%, 97%, 98%, 99% or 100% identical to the amino acid sequence of SEQ ID NO: 18, and a light chain variable region (V_{L}FAP) comprising an amino acid sequence that is at least about 95%, 96%, 97%, 98%, 99% or 100% identical to the amino acid sequence of SEQ ID NO: 19, or (b) a heavy chain variable region (V_{H}FAP) comprising an amino acid sequence that is at least about 95%, 96%, 97%, 98%, 99% or 100% identical to the amino acid sequence of SEQ ID NO: 10, and a light chain variable region (V_{L}FAP) comprising an amino acid sequence that is at least about 95%, 96%, 97%, 98%, 99% or 100% identical to the amino acid sequence of SEQ ID NO: 11. Particularly, the antigen binding domain capable of specific binding to FAP comprises a heavy chain variable region (V_{H}FAP) comprising the amino acid sequence of SEQ ID NO: 18 and a light chain variable region (V_{L}FAP) comprising the amino acid sequence of SEQ ID NO: 19.

[0344] EpCAM-Targeting Bispecific Agonistic CD28 Antigen Binding Molecules

[0345] In another aspect, a bispecific agonistic CD28 antigen binding molecule is provided, wherein the antigen binding domain capable of specific binding to a tumor-associated antigen is an antigen binding domain capable of specific binding to epithelial cell adhesion molecule (EpCAM).

[0346] In one aspect, provided is a bispecific agonistic CD28 antigen binding molecule as described herein, wherein the antigen binding domain capable of specific binding to EpCAM comprises a heavy chain variable region (V_{H}EpCAM) comprising (i) CDR-H1 comprising the amino acid sequence of SEQ ID NO:515, (ii) CDR-H2 comprising the amino acid sequence of SEQ ID NO:516, and (iii) CDR-H3 comprising the amino acid sequence of SEQ ID NO:517, and a light chain variable region (V_{L}EpCAM) comprising (iv) CDR-L1 comprising the amino acid sequence of SEQ ID NO:518, (v) CDR-L2 comprising the amino acid sequence of SEQ ID NO:519, and (vi) CDR-L3 comprising the amino acid sequence of SEQ ID NO:520. In one aspect, a bispecific agonistic CD28 antigen binding molecule is provided, wherein the antigen binding domain capable of specific binding to EpCAM comprises a heavy chain variable region (V_{H}EpCAM) comprising an amino acid sequence that is at least about 95%, 96%, 97%, 98%, 99% or 100% identical to the amino acid sequence of SEQ ID NO:521, and a light chain variable region (V_{L}EpCAM) comprising an amino acid sequence that is at least about 95%, 96%, 97%, 98%, 99% or 100% identical to the amino acid sequence of SEQ ID NO:522. Particularly, the antigen binding domain capable of specific binding to EpCAM comprises a heavy chain variable region (V_{H}EpCAM) comprising the amino acid sequence of SEQ ID NO:521 and a light chain variable region (V_{L}EpCAM) comprising the amino acid sequence of SEQ ID NO:522.

[0347] HER3-Targeting Bispecific Agonistic CD28 Antigen Binding Molecules

[0348] In another aspect, a bispecific agonistic CD28 antigen binding molecule is provided, wherein the antigen binding domain capable of specific binding to a tumor-associated antigen is an antigen binding domain capable of specific binding to HER3.

[0349] In one aspect, provided is a bispecific agonistic CD28 antigen binding molecule as described herein, wherein the antigen binding domain capable of specific binding to HER3 comprises a heavy chain variable region (V_{H}HER3) comprising (i) CDR-H1 comprising the amino acid sequence of SEQ ID NO:523, (ii) CDR-H2 comprising the amino acid sequence of SEQ ID NO:524, and (iii) CDR-H3 comprising the amino acid sequence of SEQ ID NO:525, and a light chain variable region (V_{L}HER3) comprising (iv) CDR-L1 comprising the amino acid sequence of SEQ ID NO:526, (v) CDR-L2 comprising the amino acid sequence of SEQ ID NO:527, and (vi) CDR-L3 comprising the amino acid sequence of SEQ ID NO:528. In one aspect, a bispecific agonistic CD28 antigen binding molecule is provided, wherein the antigen binding domain capable of specific binding to HER3 comprises a heavy chain variable region (V_{H}HER3) comprising an amino acid sequence that is at least about 95%, 96%, 97%, 98%, 99% or 100% identical to the amino acid sequence of SEQ ID NO:529, and a light chain variable region (V_{L}HER3) comprising an amino acid sequence that is at least about 95%, 96%, 97%, 98%, 99% or 100% identical to the amino acid sequence of SEQ ID NO:530. Particularly, the antigen binding domain capable of specific binding to HER3 comprises a heavy chain variable region (V_{H}HER3) comprising the amino acid sequence of SEQ ID NO:529 and a light chain variable region (V_{L}HER3) comprising the amino acid sequence of SEQ ID NO:530.

[0350] CD30-Targeting Bispecific Agonistic CD28 Antigen Binding Molecules

[0351] In another aspect, a bispecific agonistic CD28 antigen binding molecule is provided, wherein the antigen binding domain capable of specific binding to a tumor-associated antigen is an antigen binding domain capable of specific binding to CD30.

[0352] In one aspect, provided is a bispecific agonistic CD28 antigen binding molecule as described herein, wherein the antigen binding domain capable of specific binding to CD30 comprises a heavy chain variable region (V_{H}CD30) comprising (i) CDR-H1 comprising the amino acid sequence of SEQ ID NO:531, (ii) CDR-H2 comprising the amino acid sequence of SEQ ID NO:532, and (iii) CDR-H3 comprising the amino acid sequence of SEQ ID NO:533, and a light chain variable region (V_{L}CD30) comprising (iv) CDR-L1 comprising the amino acid sequence of SEQ ID NO:534, (v) CDR-L2 comprising the amino acid sequence of SEQ ID NO:535, and (vi) CDR-L3 comprising the amino acid sequence of SEQ ID NO:536. In one aspect, a bispecific agonistic CD28 antigen binding molecule is provided, wherein the antigen binding domain capable of specific binding to CD30 comprises a heavy chain variable region (V_{H}CD30) comprising an amino acid sequence that is at least about 95%, 96%, 97%, 98%, 99% or 100% identical to the amino acid sequence of SEQ ID NO:537, and a light chain variable region (V_{L}CD30) comprising an amino acid sequence that is at least about 95%, 96%, 97%, 98%, 99% or 100% identical to the amino acid sequence of SEQ ID NO:538. Particularly, the antigen binding domain capable of specific binding to CD30 comprises a heavy chain variable region (V_{H}CD30) comprising the amino acid sequence of SEQ ID NO:537 and a light chain variable region (V_{L}CD30) comprising the amino acid sequence of SEQ ID NO:538.

[0353] TBPG (5T4)-Targeting Bispecific Agonistic CD28 Antigen Binding Molecules

[0354] In another aspect, a bispecific agonistic CD28 antigen binding molecule is provided, wherein the antigen binding domain capable of specific binding to a tumor-associated antigen is an antigen binding domain capable of specific binding to TBPG (5T4).

[0355] In one aspect, provided is a bispecific agonistic CD28 antigen binding molecule as described herein, wherein the antigen binding domain capable of specific binding to TBPG comprises a heavy chain variable region (V_{H}TBPG) comprising (i) CDR-H1 comprising the amino acid sequence of SEQ ID NO:539, (ii) CDR-H2 comprising the amino acid sequence of SEQ ID NO:540, and (iii) CDR-H3 comprising the amino acid sequence of SEQ ID NO:541, and a light chain variable region (V_{L}TBPG) comprising (iv) CDR-L1 comprising the amino acid sequence of SEQ ID NO:542, (v) CDR-L2 comprising the amino acid sequence of SEQ ID NO:543, and (vi) CDR-L3 comprising the amino acid sequence of SEQ ID NO:544. In one aspect, a bispecific agonistic CD28 antigen binding molecule is provided, wherein the antigen binding domain capable of specific binding to TBPG comprises a heavy chain variable region (V_{H}TBPG) comprising an amino acid sequence that is at least about 95%, 96%, 97%, 98%, 99% or 100% identical to the amino acid sequence of SEQ ID NO:545, and a light chain variable region (V_{L}TBPG) comprising an amino acid sequence that is at least about 95%, 96%, 97%, 98%, 99% or 100% identical to the amino acid sequence of SEQ ID NO:546. Particularly, the antigen binding domain capable of specific binding to TBPG comprises a heavy chain variable region (V_{H}TBPG) comprising the amino acid sequence of SEQ ID NO:545 and a light chain variable region (V_{L}TBPG) comprising the amino acid sequence of SEQ ID NO:546.

[0356] MM-Targeting Bispecific Agonistic CD28 Antigen Binding Molecules

[0357] The invention also provides novel bispecific agonistic CD28 antigen binding molecules that are particularly useful in the treatment of multiple myeloma. The molecules comprise at least one antigen binding domain capable of specific binding to a Multiple Myeloma (MM) cell surface antigen which causes cross-linking in the presence of MM cell surface antigen-expressing cells and an Fc domain composed of a first and a second subunit capable of stable association comprising one or more amino acid substitution that reduces the binding affinity of the antigen binding molecule to an Fc receptor and/or effector function (Fc silent). Thus unspecific cross-linking via Fc receptors is avoided and specific T cell activation in the presence of MM cell surface antigen-expressing cells is achieved.

[0358] Thus, herein provided is a bispecific agonistic CD28 antigen binding molecule comprising an antigen binding domain capable of specific binding to CD28, an antigen binding domain capable of specific binding to a Multiple Myeloma (MM) cell surface antigen, and a Fc domain composed of a first and a second subunit capable of stable association comprising one or more amino acid substitution that reduces the binding affinity of the antigen binding molecule to an Fc receptor and/or effector function. In one aspect, the bispecific agonistic CD28 antigen binding molecule as described herein is characterized by monovalent binding to CD28. In a further aspect, the bispecific agonistic CD28 antigen binding molecule as described herein is characterized by monovalent binding to the Multiple Myeloma (MM) cell surface antigen.

[0359] In one aspect, a bispecific agonistic CD28 antigen binding molecule as defined herein before is provided, wherein the Fc domain is an IgG, particularly an IgG1 Fc domain or an IgG4 Fc domain. In one particular aspect, the Fc domain composed of a first and a second subunit capable of stable association is an IgG1 Fc domain. The Fc domain comprises one or more amino acid substitution that reduces the binding affinity of the antigen binding molecule to an Fc receptor and/or reduces or abolishes effector function. In one aspect, the Fc domain comprises the amino acid substitutions L234A and L235A (numbering according to Kabat EU index). In one aspect, the Fc domain is of human IgG1 subclass and comprises the amino acid mutations L234A, L235A and P329G (numbering according to Kabat EU index).

[0360] In one aspect, a bispecific agonistic CD28 antigen binding molecule as defined herein before is provided, wherein the MM cell surface antigen is selected from the group consisting of CD38, BCMA and GPRC5D.

[0361] In another aspect, a bispecific agonistic CD28 antigen binding molecule is provided, wherein the antigen binding domain capable of specific binding to a tumor-associated antigen is an antigen binding domain capable of specific binding to CD38.

[0362] In one aspect, provided is a bispecific agonistic CD28 antigen binding molecule as described herein, wherein the antigen binding domain capable of specific binding to CD38 comprises a heavy chain variable region (V_{H}CD38) comprising (i) CDR-H1 comprising the amino acid sequence of SEQ ID NO:547, (ii) CDR-H2 comprising the amino acid sequence of SEQ ID NO:548, and (iii) CDR-H3 comprising the amino acid sequence of SEQ ID NO:549, and a light chain variable region (V_{L}CD38) comprising (iv) CDR-L1 comprising the amino acid sequence of SEQ ID NO:550, (v) CDR-L2 comprising the amino acid sequence of SEQ ID NO:551, and (vi) CDR-L3 comprising the amino acid sequence of SEQ ID NO:552. In one aspect, a bispecific agonistic CD28 antigen binding molecule is provided, wherein the antigen binding domain capable of specific binding to CD38 comprises a heavy chain variable region (V_{H}CD38) comprising an amino acid sequence that is at least about 95%, 96%, 97%, 98%, 99% or 100% identical to the amino acid sequence of SEQ ID NO:553, and a light chain variable region (V_{L}CD38) comprising an amino acid sequence that is at least about 95%, 96%, 97%, 98%, 99% or 100% identical to the amino acid sequence of SEQ ID NO:554. Particularly, the antigen binding domain capable of specific binding to CD38 comprises a heavy chain variable region (V_{H}CD38) comprising the amino acid sequence of SEQ ID NO:553 and a light chain variable region (V_{L}CD38) comprising the amino acid sequence of SEQ ID NO:554.

[0363] In yet another aspect, a bispecific agonistic CD28 antigen binding molecule is provided, wherein the antigen binding domain capable of specific binding to a tumor-associated antigen is an antigen binding domain capable of specific binding to BCMA.

[0364] In one aspect, provided is a bispecific agonistic CD28 antigen binding molecule as described herein, wherein the antigen binding domain capable of specific binding to BCMA comprises a heavy chain variable region (VHBCMA) comprising (i) CDR-H1 comprising the amino acid sequence of SEQ ID NO:555, (ii) CDR-H2 comprising the amino acid sequence of SEQ ID NO:556, and (iii) CDR-H3 comprising the amino acid sequence of SEQ ID NO:557, and a light chain variable region (V_{L}BCMA) comprising (iv) CDR-L1 comprising the amino acid sequence of SEQ ID NO:558, (v) CDR-L2 comprising the amino acid sequence of SEQ ID NO:559, and (vi) CDR-L3 comprising the amino acid sequence of SEQ ID NO:560. In one aspect, a bispecific agonistic CD28 antigen binding molecule is provided, wherein the antigen binding domain capable of specific binding to BCMA comprises a heavy chain variable region (VHBCMA) comprising an amino acid sequence that is at least about 95%, 96%, 97%, 98%, 99% or 100% identical to the amino acid sequence of SEQ ID NO:561, and a light chain variable region (V_{L}BCMA) comprising an amino acid sequence that is at least about 95%, 96%, 97%, 98%, 99% or 100% identical to the amino acid sequence of SEQ ID NO:562. Particularly, the antigen binding domain capable of specific binding to BCMA comprises a heavy chain variable region (VHBCMA) comprising the amino acid sequence of SEQ ID NO:561 and a light chain variable region (V_{L}BCMA) comprising the amino acid sequence of SEQ ID NO:562.

[0365] GPRC5D-Targeting Bispecific Agonistic CD28 Antigen Binding Molecules

[0366] In another aspect, a bispecific agonistic CD28 antigen binding molecule is provided, wherein the antigen binding domain capable of specific binding to a tumor-associated antigen is an antigen binding domain capable of specific binding to GPRC5D.

[0367] In one aspect, provided is a bispecific agonistic CD28 antigen binding molecule as described herein, wherein the antigen binding domain capable of specific binding to GPRC5D comprises a heavy chain variable region (V_{H}GPRC5D) comprising (i) CDR-H1 comprising the amino acid sequence of SEQ ID NO:563, (ii) CDR-H2 comprising the amino acid sequence of SEQ ID NO:564, and (iii) CDR-H3 comprising the amino acid sequence of SEQ ID NO:565, and a light chain variable region (V_{L}GPRC5D) comprising (iv) CDR-L1 comprising the amino acid sequence of SEQ ID NO:566, (v) CDR-L2 comprising the amino acid sequence of SEQ ID NO:567, and (vi) CDR-L3 comprising the amino acid sequence of SEQ ID NO:568.

[0368] In one aspect, a bispecific agonistic CD28 antigen binding molecule is provided, wherein the antigen binding domain capable of specific binding to GPRC5D comprises a heavy chain variable region (V_{H}GPRC5D) comprising an amino acid sequence selected from the group consisting of SEQ ID NO:569, SEQ ID NO:571, SEQ ID NO:572 and SEQ ID NO:573 and a light chain variable region (V_{L}GPRC5D) comprising an amino acid sequence selected from the group consisting of SEQ ID NO:570, SEQ ID NO:574, SEQ ID NO:575, SEQ ID NO:576, SEQ ID NO:577 and SEQ ID NO:578.

[0369] In one aspect, a bispecific agonistic CD28 antigen binding molecule is provided, wherein the antigen binding domain capable of specific binding to GPRC5D comprises a heavy chain variable region (V_{H}GPRC5D) comprising an amino acid sequence that is at least about 95%, 96%, 97%, 98%, 99% or 100% identical to the amino acid sequence of SEQ ID NO:569, and a light chain variable region (V_{L}GPRC5D) comprising an amino acid sequence that is at least about 95%, 96%, 97%, 98%, 99% or 100% identical to the amino acid sequence of SEQ ID NO:570. Particularly, the antigen binding domain capable of specific binding to GPRC5D comprises a heavy chain variable region (V_{H}GPRC5D) comprising the amino acid sequence of SEQ ID NO:569 and a light chain variable region (V_{L}GPRC5D) comprising the amino acid sequence of SEQ ID NO:570.

[0370] In another aspect, provided is a bispecific agonistic CD28 antigen binding molecule as described herein, wherein the antigen binding domain capable of specific binding to GPRC5D comprises a heavy chain variable region (V_{H}GPRC5D) comprising (i) CDR-H1 comprising the amino acid sequence of SEQ ID NO:579, (ii) CDR-H2 comprising the amino acid sequence of SEQ ID NO:580, and (iii) CDR-H3 comprising the amino acid sequence of SEQ ID NO:581, and a light chain variable region (V_{L}GPRC5D) comprising (iv) CDR-L1 comprising the amino acid sequence of SEQ ID NO:582, (v) CDR-L2 comprising the amino acid sequence of SEQ ID NO:583, and (vi) CDR-L3 comprising the amino acid sequence of SEQ ID NO:584.

[0371] In one aspect, a bispecific agonistic CD28 antigen binding molecule is provided, wherein the antigen binding domain capable of specific binding to GPRC5D comprises a heavy chain variable region (V_{H}GPRC5D) comprising an amino acid sequence selected from the group consisting of SEQ ID NO: 585, SEQ ID NO: 586, SEQ ID NO: 587, SEQ ID NO: 588, SEQ ID NO: 589 and SEQ ID NO:590 and a light chain variable region (V_{L}GPRC5D) comprising an amino acid sequence selected from the group consisting of SEQ ID NO: 591, SEQ ID NO: 592, SEQ ID NO: 593, SEQ ID NO: 594 and SEQ ID NO: 595.

[0372] In another aspect, provided is bispecific agonistic CD28 antigen binding molecule, wherein the antigen binding domain capable of specific binding to GPRC5D comprises

[0373] (a) a heavy chain variable region (V_{H}GPRC5D) comprising the amino acid sequence of SEQ ID NO:569 and a light chain variable region (V_{L}GPRC5D) comprising the amino acid sequence of SEQ ID NO:570, or

[0374] (b) a heavy chain variable region (V_{H}GPRC5D) comprising the amino acid sequence of SEQ ID NO:573 and a light chain variable region (V_{L}GPRC5D) comprising the amino acid sequence of SEQ ID NO:576, or

[0375] (c) a heavy chain variable region (V_{H}GPRC5D) comprising the amino acid sequence of SEQ ID NO:569 and a light chain variable region (V_{L}GPRC5D) comprising the amino acid sequence of SEQ ID NO:572, or

[0376] (d) a heavy chain variable region (V_{H}GPRC5D) comprising the amino acid sequence of SEQ ID NO:586 and a light chain variable region (V_{L}GPRC5D) comprising the amino acid sequence of SEQ ID NO:593, or

[0377] (e) a heavy chain variable region (V_{H}GPRC5D) comprising the amino acid sequence of SEQ ID NO:587 and a light chain variable region (V_{L}GPRC5D) comprising the amino acid sequence of SEQ ID NO:592.

[0378] Bispecific Agonistic CD28 Antigen Binding Molecules Monovalent for Binding to CD28 and Monovalent for Binding to the Tumor-Associated Antigen (1+1 Format)

[0379] In another aspect, provided is a bispecific agonistic CD28 antigen binding molecule as described herein, comprising

[0380] (a) one Fab fragment capable of specific binding to CD28,

[0381] (b) one crossFab fragment capable of specific binding to a tumor-associated antigen, and

[0382] (c) a Fc domain composed of a first and a second subunit capable of stable association comprising one or more amino acid substitution that reduces the binding affinity of the antigen binding molecule to an Fc receptor and/or effector function.

[0383] In one aspect, provided is a bispecific agonistic CD28 antigen binding molecule as described herein, comprising

[0384] (a) one Fab fragment capable of specific binding to CD28,

[0385] (b) one crossFab fragment capable of specific binding to CEA, and

[0386] (c) a Fc domain composed of a first and a second subunit capable of stable association comprising one or more amino acid substitution that reduces the binding affinity of the antigen binding molecule to an Fc receptor and/or effector function.

[0387] In one particular aspect, provided is a bispecific agonistic CD28 antigen binding molecule comprising a first light chain comprising the amino acid sequence of SEQ ID NO:65, a first heavy chain comprising the amino acid sequence of SEQ ID NO:66, a second heavy chain comprising the amino acid sequence of SEQ ID NO:87 and a second light chain comprising the amino acid sequence of SEQ ID NO:88 (Molecule M).

[0388] In another aspect, provided is a bispecific agonistic CD28 antigen binding molecule as described herein, comprising

[0389] (a) one Fab fragment capable of specific binding to CD28,

[0390] (b) one crossFab fragment capable of specific binding to FAP, and

[0391] (c) a Fc domain composed of a first and a second subunit capable of stable association comprising one or more amino acid substitution that reduces the binding affinity of the antigen binding molecule to an Fc receptor and/or effector function.

[0392] In one particular aspect, provided is a bispecific agonistic CD28 antigen binding molecule comprising a first light chain comprising the amino acid sequence of SEQ ID NO:65, a first heavy chain comprising the amino acid sequence of SEQ ID NO:66, a second heavy chain comprising the amino acid sequence of SEQ ID NO:67 and a second light chain comprising the amino acid sequence of SEQ ID NO:68 (Molecule C).

[0393] In a further aspect, provided is a bispecific agonistic CD28 antigen binding molecule as described herein, comprising

[0394] (a) a first Fab fragment capable of specific binding to CD28,

[0395] (b) a second Fab fragment capable of specific binding to a tumor-associated antigen, and

[0396] (c) a Fc domain composed of a first and a second subunit capable of stable association comprising one or more amino acid substitution that reduces the binding affinity of the antigen binding molecule to an Fc receptor and/or effector function,

[0397] wherein the first Fab fragment capable of specific binding to CD28 is fused at the C-terminus of the Fab heavy chain to the N-terminus of the Fab heavy chain of the second Fab fragment capable of specific binding to a tumor-associated antigen, which is in turn fused at its C-terminus to the N-terminus of one of the Fc domain subunits.

[0398] In one particular aspect, provided is a bispecific agonistic CD28 antigen binding molecule comprising a first light chain comprising the amino acid sequence of SEQ ID NO:77, a second light chain comprising the amino acid sequence of SEQ ID NO:78, a first heavy chain comprising the amino acid sequence of SEQ ID NO:75, and a second heavy chain comprising the amino acid sequence of SEQ ID NO:79 (Molecule H).

[0399] In a further aspect, provided is a bispecific agonistic CD28 antigen binding molecule as described herein, comprising

[0400] (a) a Fab fragment capable of specific binding to CD28,

[0401] (b) a VH and VL domain capable of specific binding to a tumor-associated antigen, and

[0402] (c) a Fc domain composed of a first and a second subunit capable of stable association comprising one or more amino acid substitution that reduces the binding affinity of the antigen binding molecule to an Fc receptor and/or effector function,

wherein the Fab fragment capable of specific binding to CD28 is fused at its C-terminus to the N-terminus of the first Fc domain subunit, and wherein one of the VH and VL domain capable of specific binding to a tumor-associated antigen is fused via a peptide linker to the C-terminus of the first Fc domain subunit and the other one of the VH and VL domain capable of specific binding to a tumor-associated antigen is fused via a peptide linker to the C-terminus of the second Fc domain subunit.

[0403] In one aspect, the peptide linker comprises an amino acid sequence selected from SEQ ID NO:146, SEQ ID NO:147, SEQ ID NO: 151 and SEQ ID NO:152. More particularly, the peptide linker comprises the SEQ ID NO: 152.

[0404] In one particular aspect, provided is a bispecific agonistic CD28 antigen binding molecule comprising a light chain comprising the amino acid sequence of SEQ ID NO:62, a first heavy chain comprising the amino acid sequence of SEQ ID NO:72, and a second heavy chain comprising the amino acid sequence of SEQ ID NO:80 (Molecule I).

[0405] In one aspect, provided is a bispecific agonistic CD28 antigen binding molecule as described herein, comprising

[0406] (a) one Fab fragment capable of specific binding to CD28 comprising

(i) a heavy chain variable region (V_{H}CD28) comprising the amino acid sequence of SEQ ID NO:47 and a light chain variable region (V_{L}CD28) comprising the amino acid sequence of SEQ ID NO:54,
(ii) a heavy chain variable region (V_{H}CD28) comprising the amino acid sequence of SEQ ID NO:46 and a light chain variable region (V_{L}CD28) comprising the amino acid sequence of SEQ ID NO:53, or
(iii) a heavy chain variable region (V_{H}CD28) comprising the amino acid sequence of SEQ ID NO:42 and a light chain variable region (V_{L}CD28) comprising the amino acid sequence of SEQ ID NO:27,

[0407] (b) one crossFab fragment capable of specific binding to a tumor-associated antigen, and

[0408] (c) a Fc domain composed of a first and a second subunit capable of stable association comprising one or more amino acid substitution that reduces the binding affinity of the antigen binding molecule to an Fc receptor and/or effector function.

[0409] In one aspect, provided is a bispecific agonistic CD28 antigen binding molecule as described herein, comprising

[0410] (a) one Fab fragment capable of specific binding to CD28 comprising

(i) a heavy chain variable region (V_{H}CD28) comprising the amino acid sequence of SEQ ID NO:47 and a light chain variable region (V_{L}CD28) comprising the amino acid sequence of SEQ ID NO:54, or
(ii) a heavy chain variable region (V_{H}CD28) comprising the amino acid sequence of SEQ ID NO:46 and a light chain variable region (V_{L}CD28) comprising the amino acid sequence of SEQ ID NO:53, or
(iii) a heavy chain variable region (V_{H}CD28) comprising the amino acid sequence of SEQ ID NO:42 and a light chain variable region (V_{L}CD28) comprising the amino acid sequence of SEQ ID NO:27,

[0411] (b) one crossFab fragment capable of specific binding to CEA comprising

(i) a heavy chain variable region (V_{H}CEA) comprising the amino acid sequence of SEQ ID NO:186 and a light chain variable region (V_{L}CEA) comprising the amino acid sequence of SEQ ID NO: 187, or
(ii) a heavy chain variable region (V_{H}CEA) comprising the amino acid sequence of SEQ ID NO:200 and a light chain variable region (V_{L}CEA) comprising the amino acid sequence of SEQ ID NO:201, or
(iii) a heavy chain variable region (V_{H}CEA) comprising the amino acid sequence of SEQ ID NO:513 and a light chain variable region (V_{L}CEA) comprising the amino acid sequence of SEQ ID NO:514,

[0412] and (c) a Fc domain composed of a first and a second subunit capable of stable association comprising one or more amino acid substitution that reduces the binding affinity of the antigen binding molecule to an Fc receptor and/or effector function.

[0413] In one aspect, provided is a bispecific agonistic CD28 antigen binding molecule comprising a first light chain comprising the amino acid sequence of SEQ ID NO:352, a first heavy chain comprising the amino acid sequence of SEQ ID NO:351, a second heavy chain comprising the amino acid sequence of SEQ ID NO:353 and a second light chain comprising the amino acid sequence of SEQ ID NO:354 (Molecule 11A). In one aspect, provided is a bispecific agonistic CD28 antigen binding molecule comprising a first light chain comprising the amino acid sequence of SEQ ID NO:352, a first heavy chain comprising the amino acid sequence of SEQ ID NO:351, a second heavy chain comprising the amino acid sequence of SEQ ID NO:355 and a second light chain comprising the amino acid sequence of SEQ ID NO:356 (Molecule 11B). In one aspect, provided is a bispecific agonistic CD28 antigen binding molecule comprising a first light chain comprising the amino acid sequence of SEQ ID NO:352, a first heavy chain comprising the amino acid sequence of SEQ ID NO:351, a second heavy chain comprising the amino acid sequence of SEQ ID NO:357 and a second light chain comprising the amino acid sequence of SEQ ID NO:358 (Molecule 11C). In one aspect, provided is a bispecific agonistic CD28 antigen binding molecule comprising a first light chain comprising the amino acid sequence of SEQ ID NO:352, a first heavy chain comprising the amino acid sequence of SEQ ID NO:351, a second heavy chain comprising the amino acid sequence of SEQ ID NO:359 and a second light chain comprising the amino acid sequence of SEQ ID NO:354 (Molecule 11D). In one aspect, provided is a bispecific agonistic CD28 antigen binding molecule comprising a first light chain comprising the amino acid sequence of SEQ ID NO:370, a first heavy chain comprising the amino acid sequence of SEQ ID NO:369, a second heavy chain comprising the amino acid sequence of SEQ ID NO:353 and a second light chain comprising the amino acid sequence of SEQ ID NO:356 (Molecule 11I). In one aspect, provided is a bispecific agonistic CD28 antigen binding molecule comprising a first light chain comprising the amino acid sequence of SEQ ID NO:370, a first heavy chain comprising the amino acid sequence of SEQ ID NO:369, a second heavy chain comprising the amino acid sequence of SEQ ID NO:359 and a second light chain comprising the amino acid sequence of SEQ ID NO:354 (Molecule 11J). In one aspect, provided is a bispecific agonistic CD28 antigen binding molecule comprising a first light chain comprising the amino acid sequence of SEQ ID NO:370, a first heavy chain comprising the amino acid sequence of SEQ ID NO:369, a second heavy chain comprising the amino acid sequence of SEQ ID NO:357 and a second light chain comprising the amino acid sequence of SEQ ID NO:358 (Molecule 11K). In one aspect, provided is a bispecific agonistic CD28 antigen binding molecule comprising a first light chain comprising the amino acid sequence of SEQ ID NO:370, a first heavy chain comprising the amino acid sequence of SEQ ID NO:369, a second heavy chain comprising the amino acid sequence of SEQ ID NO:359 and a second light chain comprising the amino acid sequence of SEQ ID NO:356 (Molecule 11L). In one aspect, the bispecific agonistic CD28 antigen binding molecule comprises a first light chain comprising the amino acid sequence of SEQ ID NO:376, a first heavy chain comprising the amino acid sequence of SEQ ID NO:375, a second heavy chain comprising the amino acid sequence of SEQ ID NO:357 and a second light chain comprising the amino acid sequence of SEQ ID NO:358 (Molecule 11R). In one aspect, the bispecific agonistic CD28 antigen binding molecule comprises a first light chain comprising the amino acid sequence of SEQ ID NO:376, a first heavy chain comprising the amino acid sequence of SEQ ID NO:375, a second heavy chain comprising the amino acid sequence of SEQ ID NO:355 and a second light chain comprising the amino acid sequence of SEQ ID NO:356 (Molecule 11S). In one aspect, the bispecific agonistic CD28 antigen binding molecule comprises a first light chain comprising the amino acid sequence of SEQ ID NO:376, a first heavy chain comprising the amino acid sequence of SEQ ID NO:375, a second heavy chain comprising the amino acid sequence of SEQ ID NO:355 and a second light chain comprising the amino acid sequence of SEQ ID NO:354 (Molecule 11T).

[0414] In one particular aspect, the bispecific agonistic CD28 antigen binding molecule comprises a first light chain comprising the amino acid sequence of SEQ ID NO:376, a first heavy chain comprising the amino acid sequence of SEQ ID NO:375, a second heavy chain comprising the amino acid sequence of SEQ ID NO:355 and a second light chain comprising the amino acid sequence of SEQ ID NO:356 (Molecule 11S). In another particular aspect, provided is a bispecific agonistic CD28 antigen binding molecule comprising a first light chain comprising the amino acid sequence of SEQ ID NO:352, a first heavy chain comprising the amino acid sequence of SEQ ID NO:351, a second heavy chain comprising the amino acid sequence of SEQ ID NO:355 and a second light chain comprising the amino acid sequence of SEQ ID NO:356 (Molecule 11B).

[0415] In another aspect, provided is a bispecific agonistic CD28 antigen binding molecule as described herein, comprising

[0416] (a) one crossFab fragment capable of specific binding to CD28,

[0417] (b) one Fab fragment capable of specific binding to a tumor-associated antigen, and

[0418] (c) a Fc domain composed of a first and a second subunit capable of stable association comprising one or more amino acid substitution that reduces the binding affinity of the antigen binding molecule to an Fc receptor and/or effector function.

[0419] In one aspect, provided is a bispecific agonistic CD28 antigen binding molecule as described herein, comprising

[0420] (a) one crossFab fragment capable of specific binding to CD28,

[0421] (b) one Fab fragment capable of specific binding to CEA, and

[0422] (c) a Fc domain composed of a first and a second subunit capable of stable association comprising one or more amino acid substitution that reduces the binding affinity of the antigen binding molecule to an Fc receptor and/or effector function.

[0423] In one aspect, provided is a bispecific agonistic CD28 antigen binding molecule as described herein, comprising

[0424] (a) one crossFab fragment capable of specific binding to CD28 comprising

(i) a heavy chain variable region (V_{H}CD28) comprising the amino acid sequence of SEQ ID NO:47 and a light chain variable region (V_{L}CD28) comprising the amino acid sequence of SEQ ID NO:54, or
(ii) a heavy chain variable region (V_{H}CD28) comprising the amino acid sequence of SEQ ID NO:46 and a light chain variable region (V_{L}CD28) comprising the amino acid sequence of SEQ ID NO:53, or
(iii) a heavy chain variable region (V_{H}CD28) comprising the amino acid sequence of SEQ ID NO:42 and a light chain variable region (V_{L}CD28) comprising the amino acid sequence of SEQ ID NO:27,

[0425] (b) one Fab fragment capable of specific binding to CEA comprising

(i) a heavy chain variable region (V_{H}CEA) comprising the amino acid sequence of SEQ ID NO:186 and a light chain variable region (V_{L}CEA) comprising the amino acid sequence of SEQ ID NO: 187, or
(ii) a heavy chain variable region (V_{H}CEA) comprising the amino acid sequence of SEQ ID NO:200 and a light chain variable region (V_{L}CEA) comprising the amino acid sequence of SEQ ID NO:201, or
(iii) a heavy chain variable region (V_{H}CEA) comprising the amino acid sequence of SEQ ID NO:513 and a light chain variable region (V_{L}CEA) comprising the amino acid sequence of SEQ ID NO:514,

[0426] and (c) a Fc domain composed of a first and a second subunit capable of stable association comprising one or more amino acid substitution that reduces the binding affinity of the antigen binding molecule to an Fc receptor and/or effector function.

[0427] In one aspect, the bispecific agonistic CD28 antigen binding molecule comprises a first light chain comprising the amino acid sequence of SEQ ID NO:361, a first heavy chain comprising the amino acid sequence of SEQ ID NO:360, a second heavy chain comprising the amino acid sequence of SEQ ID NO:362 and a second light chain comprising the amino acid sequence of SEQ ID NO:363 (Molecule 11E). In one aspect, the bispecific agonistic CD28 antigen binding molecule comprises a first light chain comprising the amino acid sequence of SEQ ID NO:361, a first heavy chain comprising the amino acid sequence of SEQ ID NO:360, a second heavy chain comprising the amino acid sequence of SEQ ID NO:364 and a second light chain comprising the amino acid sequence of SEQ ID NO:365 (Molecule 11F). In one aspect, the bispecific agonistic CD28 antigen binding molecule comprises a first light chain comprising the amino acid sequence of SEQ ID NO:361, a first heavy chain comprising the amino acid sequence of SEQ ID NO:360, a second heavy chain comprising the amino acid sequence of SEQ ID NO:366 and a second light chain comprising the amino acid sequence of SEQ ID NO:367 (Molecule 11G). In one aspect, the bispecific agonistic CD28 antigen binding molecule comprises a first light chain comprising the amino acid sequence of SEQ ID NO:361, a first heavy chain comprising the amino acid sequence of SEQ ID NO:360, a second heavy chain comprising the amino acid sequence of SEQ ID NO:368 and a second light chain comprising the amino acid sequence of SEQ ID NO:363 (Molecule 11H). In one aspect, the bispecific agonistic CD28 antigen binding molecule comprises a first light chain comprising the amino acid sequence of SEQ ID NO:372, a first heavy chain comprising the amino acid sequence of SEQ ID NO:371, a second heavy chain comprising the amino acid sequence of SEQ ID NO:368 and a second light chain comprising the amino acid sequence of SEQ ID NO:363 (Molecule 11M). In one aspect, the bispecific agonistic CD28 antigen binding molecule comprises a first light chain comprising the amino acid sequence of SEQ ID NO:372, a first heavy chain comprising the amino acid sequence of SEQ ID NO:371, a second heavy chain comprising the amino acid sequence of SEQ ID NO:366 and a second light chain comprising the amino acid sequence of SEQ ID NO:367 (Molecule 11N). In one aspect, the bispecific agonistic CD28 antigen binding molecule comprises a first light chain comprising the amino acid sequence of SEQ ID NO:372, a first heavy chain comprising the amino acid sequence of SEQ ID NO:371, a second heavy chain comprising the amino acid sequence of SEQ ID NO:364 and a second light chain comprising the amino acid sequence of SEQ ID NO:365 (Molecule 11O).

[0428] In one aspect, provided is a bispecific agonistic CD28 antigen binding molecule as described herein, comprising

[0429] (a) one Fab fragment capable of specific binding to CD28,

[0430] (b) one crossFab fragment capable of specific binding to EpCAM, and

[0431] (c) a Fc domain composed of a first and a second subunit capable of stable association comprising one or more amino acid substitution that reduces the binding affinity of the antigen binding molecule to an Fc receptor and/or effector function.

[0432] In one aspect, provided is a bispecific agonistic CD28 antigen binding molecule as described herein, comprising

[0433] (a) one Fab fragment capable of specific binding to CD28 comprising

(i) a heavy chain variable region (V_{H}CD28) comprising the amino acid sequence of SEQ ID NO:47 and a light chain variable region (V_{L}CD28) comprising the amino acid sequence of SEQ ID NO:54, or
(ii) a heavy chain variable region (V_{H}CD28) comprising the amino acid sequence of SEQ ID NO:46 and a light chain variable region (V_{L}CD28) comprising the amino acid sequence of SEQ ID NO:53, or
(iii) a heavy chain variable region (V_{H}CD28) comprising the amino acid sequence of SEQ ID NO:42 and a light chain variable region (V_{L}CD28) comprising the amino acid sequence of SEQ ID NO:27,

[0434] (b) one crossFab fragment capable of specific binding to EpCAM comprising a heavy chain variable region (V_{H}EpCAM) comprising the amino acid sequence of SEQ ID NO:521 and a light chain variable region (V_{L}EpCAM) comprising the amino acid sequence of SEQ ID NO:522,

[0435] and (c) a Fc domain composed of a first and a second subunit capable of stable association comprising one or more amino acid substitution that reduces the binding affinity of the antigen binding molecule to an Fc receptor and/or effector function.

[0436] In one aspect, provided is a bispecific agonistic CD28 antigen binding molecule as described herein, comprising

[0437] (a) one crossFab fragment capable of specific binding to CD28,

[0438] (b) one Fab fragment capable of specific binding to EpCAM, and

[0439] (c) a Fc domain composed of a first and a second subunit capable of stable association comprising one or more amino acid substitution that reduces the binding affinity of the antigen binding molecule to an Fc receptor and/or effector function.

[0440] In one aspect, provided is a bispecific agonistic CD28 antigen binding molecule as described herein, comprising

[0441] (a) one crossFab fragment capable of specific binding to CD28 comprising

(i) a heavy chain variable region (V_{H}CD28) comprising the amino acid sequence of SEQ ID NO:47 and a light chain variable region (V_{L}CD28) comprising the amino acid sequence of SEQ ID NO:54, or
(ii) a heavy chain variable region (V_{H}CD28) comprising the amino acid sequence of SEQ ID NO:46 and a light chain variable region (V_{L}CD28) comprising the amino acid sequence of SEQ ID NO:53, or
(iii) a heavy chain variable region (V_{H}CD28) comprising the amino acid sequence of SEQ ID NO:42 and a light chain variable region (V_{L}CD28) comprising the amino acid sequence of SEQ ID NO:27,

[0442] (b) one Fab fragment capable of specific binding to EpCAM comprising a heavy chain variable region (V_{H}EpCAM) comprising the amino acid sequence of SEQ ID NO:521 and a light chain variable region (V_{L}EpCAM) comprising the amino acid sequence of SEQ ID NO:522,

[0443] and (c) a Fc domain composed of a first and a second subunit capable of stable association comprising one or more amino acid substitution that reduces the binding affinity of the antigen binding molecule to an Fc receptor and/or effector function.

[0444] In one aspect, the bispecific agonistic CD28 antigen binding molecule comprises a first light chain comprising the amino acid sequence of SEQ ID NO:367, a first heavy chain comprising the amino acid sequence of SEQ ID NO:366, a second heavy chain comprising the amino acid sequence of SEQ ID NO:390 and a second light chain comprising the amino acid sequence of SEQ ID NO:391 (Molecule 14A).

[0445] In one aspect, provided is a bispecific agonistic CD28 antigen binding molecule as described herein, comprising

[0446] (a) one Fab fragment capable of specific binding to CD28,

[0447] (b) one crossFab fragment capable of specific binding to HER3, and

[0448] (c) a Fc domain composed of a first and a second subunit capable of stable association comprising one or more amino acid substitution that reduces the binding affinity of the antigen binding molecule to an Fc receptor and/or effector function.

[0449] In one aspect, provided is a bispecific agonistic CD28 antigen binding molecule as described herein, comprising

[0450] (a) one Fab fragment capable of specific binding to CD28 comprising

(i) a heavy chain variable region (V_{H}CD28) comprising the amino acid sequence of SEQ ID NO:47 and a light chain variable region (V_{L}CD28) comprising the amino acid sequence of SEQ ID NO:54, or
(ii) a heavy chain variable region (V_{H}CD28) comprising the amino acid sequence of SEQ ID NO:46 and a light chain variable region (V_{L}CD28) comprising the amino acid sequence of SEQ ID NO:53, or
(iii) a heavy chain variable region (V_{H}CD28) comprising the amino acid sequence of SEQ ID NO:42 and a light chain variable region (V_{L}CD28) comprising the amino acid sequence of SEQ ID NO:27,

[0451] (b) one crossFab fragment capable of specific binding to HER3 comprising a heavy chain variable region (V_{H}HER3) comprising the amino acid sequence of SEQ ID NO:529 and a light chain variable region (V_{L}HER3) comprising the amino acid sequence of SEQ ID NO:530,

[0452] and (c) a Fc domain composed of a first and a second subunit capable of stable association comprising one or more amino acid substitution that reduces the binding affinity of the antigen binding molecule to an Fc receptor and/or effector function.

[0453] In one aspect, the bispecific agonistic CD28 antigen binding molecule comprises a first light chain comprising the amino acid sequence of SEQ ID NO:357, a first heavy chain comprising the amino acid sequence of SEQ ID NO:358, a second heavy chain comprising the amino acid sequence of SEQ ID NO:392 and a second light chain comprising the amino acid sequence of SEQ ID NO:393 (Molecule 14B).

[0454] In one aspect, provided is a bispecific agonistic CD28 antigen binding molecule as described herein, comprising

[0455] (a) one crossFab fragment capable of specific binding to CD28,

[0456] (b) one Fab fragment capable of specific binding to HER3, and

[0457] (c) a Fc domain composed of a first and a second subunit capable of stable association comprising one or more amino acid substitution that reduces the binding affinity of the antigen binding molecule to an Fc receptor and/or effector function.

[0458] In one aspect, provided is a bispecific agonistic CD28 antigen binding molecule as described herein, comprising

[0459] (a) one crossFab fragment capable of specific binding to CD28 comprising

(i) a heavy chain variable region (V_{H}CD28) comprising the amino acid sequence of SEQ ID NO:47 and a light chain variable region (V_{L}CD28) comprising the amino acid sequence of SEQ ID NO:54, or
(ii) a heavy chain variable region (V_{H}CD28) comprising the amino acid sequence of SEQ ID NO:46 and a light chain variable region (V_{L}CD28) comprising the amino acid sequence of SEQ ID NO:53, or
(iii) a heavy chain variable region (V_{H}CD28) comprising the amino acid sequence of SEQ ID NO:42 and a light chain variable region (V_{L}CD28) comprising the amino acid sequence of SEQ ID NO:27,

[0460] (b) one Fab fragment capable of specific binding to HER3 comprising a heavy chain variable region (V_{H}HER3) comprising the amino acid sequence of SEQ ID NO:529 and a light chain variable region (V_{L}HER3) comprising the amino acid sequence of SEQ ID NO:530,

[0461] and (c) a Fc domain composed of a first and a second subunit capable of stable association comprising one or more amino acid substitution that reduces the binding affinity of the antigen binding molecule to an Fc receptor and/or effector function.

[0462] In one aspect, provided is a bispecific agonistic CD28 antigen binding molecule as described herein, comprising

[0463] (a) one Fab fragment capable of specific binding to CD28,

[0464] (b) one crossFab fragment capable of specific binding to CD30, and

[0465] (c) a Fc domain composed of a first and a second subunit capable of stable association comprising one or more amino acid substitution that reduces the binding affinity of the antigen binding molecule to an Fc receptor and/or effector function.

[0466] In one aspect, provided is a bispecific agonistic CD28 antigen binding molecule as described herein, comprising

[0467] (a) one Fab fragment capable of specific binding to CD28 comprising

(i) a heavy chain variable region (V_{H}CD28) comprising the amino acid sequence of SEQ ID NO:47 and a light chain variable region (V_{L}CD28) comprising the amino acid sequence of SEQ ID NO:54, or
(ii) a heavy chain variable region (V_{H}CD28) comprising the amino acid sequence of SEQ ID NO:46 and a light chain variable region (V_{L}CD28) comprising the amino acid sequence of SEQ ID NO:53, or
(iii) a heavy chain variable region (V_{H}CD28) comprising the amino acid sequence of SEQ ID NO:42 and a light chain variable region (V_{L}CD28) comprising the amino acid sequence of SEQ ID NO:27,

[0468] (b) one crossFab fragment capable of specific binding to CD30 comprising a heavy chain variable region (V_{H}CD30) comprising the amino acid sequence of SEQ ID NO:537 and a light chain variable region (V_{L}CD30) comprising the amino acid sequence of SEQ ID NO:538,

[0469] and (c) a Fc domain composed of a first and a second subunit capable of stable association comprising one or more amino acid substitution that reduces the binding affinity of the antigen binding molecule to an Fc receptor and/or effector function.

[0470] In one aspect, the bispecific agonistic CD28 antigen binding molecule comprises a first light chain comprising the amino acid sequence of SEQ ID NO:357, a first heavy chain comprising the amino acid sequence of SEQ ID NO:358, a second heavy chain comprising the amino acid sequence of SEQ ID NO:394 and a second light chain comprising the amino acid sequence of SEQ ID NO:395 (Molecule 14C).

[0471] In one aspect, provided is a bispecific agonistic CD28 antigen binding molecule as described herein, comprising

[0472] (a) one crossFab fragment capable of specific binding to CD28,

[0473] (b) one Fab fragment capable of specific binding to CD30, and

[0474] (c) a Fc domain composed of a first and a second subunit capable of stable association comprising one or more amino acid substitution that reduces the binding affinity of the antigen binding molecule to an Fc receptor and/or effector function.

[0475] In one aspect, provided is a bispecific agonistic CD28 antigen binding molecule as described herein, comprising

[0476] (a) one crossFab fragment capable of specific binding to CD28 comprising

(i) a heavy chain variable region (V_{H}CD28) comprising the amino acid sequence of SEQ ID NO:47 and a light chain variable region (V_{L}CD28) comprising the amino acid sequence of SEQ ID NO:54, or
(ii) a heavy chain variable region (V_{H}CD28) comprising the amino acid sequence of SEQ ID NO:46 and a light chain variable region (V_{L}CD28) comprising the amino acid sequence of SEQ ID NO:53, or
(iii) a heavy chain variable region (V_{H}CD28) comprising the amino acid sequence of SEQ ID NO:42 and a light chain variable region (V_{L}CD28) comprising the amino acid sequence of SEQ ID NO:27,

[0477] (b) one Fab fragment capable of specific binding to CD30 comprising a heavy chain variable region (V_{H}CD30) comprising the amino acid sequence of SEQ ID NO:537 and a light chain variable region (V_{L}CD30) comprising the amino acid sequence of SEQ ID NO:538,

[0478] and (c) a Fc domain composed of a first and a second subunit capable of stable association comprising one or more amino acid substitution that reduces the binding affinity of the antigen binding molecule to an Fc receptor and/or effector function.

[0479] In one aspect, provided is a bispecific agonistic CD28 antigen binding molecule as described herein, comprising

[0480] (a) one Fab fragment capable of specific binding to CD28,

[0481] (b) one crossFab fragment capable of specific binding to TPBG, and

[0482] (c) a Fc domain composed of a first and a second subunit capable of stable association comprising one or more amino acid substitution that reduces the binding affinity of the antigen binding molecule to an Fc receptor and/or effector function.

[0483] In one aspect, provided is a bispecific agonistic CD28 antigen binding molecule as described herein, comprising

[0484] (a) one Fab fragment capable of specific binding to CD28 comprising

(i) a heavy chain variable region (V_{H}CD28) comprising the amino acid sequence of SEQ ID NO:47 and a light chain variable region (V_{L}CD28) comprising the amino acid sequence of SEQ ID NO:54, or
(ii) a heavy chain variable region (V_{H}CD28) comprising the amino acid sequence of SEQ ID NO:46 and a light chain variable region (V_{L}CD28) comprising the amino acid sequence of SEQ ID NO:53, or
(iii) a heavy chain variable region (V_{H}CD28) comprising the amino acid sequence of SEQ ID NO:42 and a light chain variable region (V_{L}CD28) comprising the amino acid sequence of SEQ ID NO:27,

[0485] (b) one crossFab fragment capable of specific binding to TPBG comprising a heavy chain variable region (VHTPBG) comprising the amino acid sequence of SEQ ID NO:545 and a light chain variable region (V_{L}TPBG) comprising the amino acid sequence of SEQ ID NO:546,

[0486] and (c) a Fc domain composed of a first and a second subunit capable of stable association comprising one or more amino acid substitution that reduces the binding affinity of the antigen binding molecule to an Fc receptor and/or effector function.

[0487] In one aspect, the bispecific agonistic CD28 antigen binding molecule comprises a first light chain comprising the amino acid sequence of SEQ ID NO:357, a first heavy chain comprising the amino acid sequence of SEQ ID NO:358, a second heavy chain comprising the amino acid sequence of SEQ ID NO:396 and a second light chain comprising the amino acid sequence of SEQ ID NO:397 (Molecule 14D).

[0488] In one aspect, provided is a bispecific agonistic CD28 antigen binding molecule as described herein, comprising

[0489] (a) one crossFab fragment capable of specific binding to CD28,

[0490] (b) one Fab fragment capable of specific binding to TPBG, and

[0491] (c) a Fc domain composed of a first and a second subunit capable of stable association comprising one or more amino acid substitution that reduces the binding affinity of the antigen binding molecule to an Fc receptor and/or effector function.

[0492] In one aspect, provided is a bispecific agonistic CD28 antigen binding molecule as described herein, comprising

[0493] (a) one crossFab fragment capable of specific binding to CD28 comprising

(i) a heavy chain variable region (V_{H}CD28) comprising the amino acid sequence of SEQ ID NO:47 and a light chain variable region (V_{L}CD28) comprising the amino acid sequence of SEQ ID NO:54, or
(ii) a heavy chain variable region (V_{H}CD28) comprising the amino acid sequence of SEQ ID NO:46 and a light chain variable region (V_{L}CD28) comprising the amino acid sequence of SEQ ID NO:53, or
(iii) a heavy chain variable region (V_{H}CD28) comprising the amino acid sequence of SEQ ID NO:42 and a light chain variable region (V_{L}CD28) comprising the amino acid sequence of SEQ ID NO:27,

[0494] (b) one Fab fragment capable of specific binding to TPBG comprising a heavy chain variable region (VHTPBG) comprising the amino acid sequence of SEQ ID NO:545 and a light chain variable region (V_{L}TPBG) comprising the amino acid sequence of SEQ ID NO:546,

[0495] and (c) a Fc domain composed of a first and a second subunit capable of stable association comprising one or more amino acid substitution that reduces the binding affinity of the antigen binding molecule to an Fc receptor and/or effector function.

[0496] In one aspect, provided is a bispecific agonistic CD28 antigen binding molecule as described herein, comprising

[0497] (a) one Fab fragment capable of specific binding to CD28,

[0498] (b) one crossFab fragment capable of specific binding to CD38, and

[0499] (c) a Fc domain composed of a first and a second subunit capable of stable association comprising one or more amino acid substitution that reduces the binding affinity of the antigen binding molecule to an Fc receptor and/or effector function.

[0500] In one aspect, provided is a bispecific agonistic CD28 antigen binding molecule as described herein, comprising

[0501] (a) one Fab fragment capable of specific binding to CD28 comprising

(i) a heavy chain variable region (V_{H}CD28) comprising the amino acid sequence of SEQ ID NO:47 and a light chain variable region (V_{L}CD28) comprising the amino acid sequence of SEQ ID NO:54, or
(ii) a heavy chain variable region (V_{H}CD28) comprising the amino acid sequence of SEQ ID NO:46 and a light chain variable region (V_{L}CD28) comprising the amino acid sequence of SEQ ID NO:53, or
(iii) a heavy chain variable region (V_{H}CD28) comprising the amino acid sequence of SEQ ID NO:42 and a light chain variable region (V_{L}CD28) comprising the amino acid sequence of SEQ ID NO:27,

[0502] (b) one crossFab fragment capable of specific binding to CD38 comprising a heavy chain variable region (V_{H}CD38) comprising the amino acid sequence of SEQ ID NO:553 and a light chain variable region (V_{L}CD38) comprising the amino acid sequence of SEQ ID NO:554,

[0503] and (c) a Fc domain composed of a first and a second subunit capable of stable association comprising one or more amino acid substitution that reduces the binding affinity of the antigen binding molecule to an Fc receptor and/or effector function.

[0504] In one aspect, the bispecific agonistic CD28 antigen binding molecule comprises a first light chain comprising the amino acid sequence of SEQ ID NO:357, a first heavy chain comprising the amino acid sequence of SEQ ID NO:358, a second heavy chain comprising the amino acid sequence of SEQ ID NO:400 and a second light chain comprising the amino acid sequence of SEQ ID NO:401 (Molecule 16C).

[0505] In one aspect, provided is a bispecific agonistic CD28 antigen binding molecule as described herein, comprising

[0506] (a) one crossFab fragment capable of specific binding to CD28,

[0507] (b) one Fab fragment capable of specific binding to CD38, and

[0508] (c) a Fc domain composed of a first and a second subunit capable of stable association comprising one or more amino acid substitution that reduces the binding affinity of the antigen binding molecule to an Fc receptor and/or effector function.

[0509] In one aspect, provided is a bispecific agonistic CD28 antigen binding molecule as described herein, comprising

[0510] (a) one crossFab fragment capable of specific binding to CD28 comprising

(i) a heavy chain variable region (V_{H}CD28) comprising the amino acid sequence of SEQ ID NO:47 and a light chain variable region (V_{L}CD28) comprising the amino acid sequence of SEQ ID NO:54, or
(ii) a heavy chain variable region (V_{H}CD28) comprising the amino acid sequence of SEQ ID NO:46 and a light chain variable region (V_{L}CD28) comprising the amino acid sequence of SEQ ID NO:53, or
(iii) a heavy chain variable region (V_{H}CD28) comprising the amino acid sequence of SEQ ID NO:42 and a light chain variable region (V_{L}CD28) comprising the amino acid sequence of SEQ ID NO:27,

[0511] (b) one Fab fragment capable of specific binding to CD38 comprising a heavy chain variable region (V_{H}CD38) comprising the amino acid sequence of SEQ ID NO:553 and a light chain variable region (V_{L}CD38) comprising the amino acid sequence of SEQ ID NO:554,

[0512] and (c) a Fc domain composed of a first and a second subunit capable of stable association comprising one or more amino acid substitution that reduces the binding affinity of the antigen binding molecule to an Fc receptor and/or effector function.

[0513] In one aspect, provided is a bispecific agonistic CD28 antigen binding molecule as described herein, comprising

[0514] (a) one Fab fragment capable of specific binding to CD28,

[0515] (b) one crossFab fragment capable of specific binding to BCMA, and

[0516] (c) a Fc domain composed of a first and a second subunit capable of stable association comprising one or more amino acid substitution that reduces the binding affinity of the antigen binding molecule to an Fc receptor and/or effector function.

[0517] In one aspect, provided is a bispecific agonistic CD28 antigen binding molecule as described herein, comprising

[0518] (a) one Fab fragment capable of specific binding to CD28 comprising

(i) a heavy chain variable region (V_{H}CD28) comprising the amino acid sequence of SEQ ID NO:47 and a light chain variable region (V_{L}CD28) comprising the amino acid sequence of SEQ ID NO:54, or
(ii) a heavy chain variable region (V_{H}CD28) comprising the amino acid sequence of SEQ ID NO:46 and a light chain variable region (V_{L}CD28) comprising the amino acid sequence of SEQ ID NO:53, or
(iii) a heavy chain variable region (V_{H}CD28) comprising the amino acid sequence of SEQ ID NO:42 and a light chain variable region (V_{L}CD28) comprising the amino acid sequence of SEQ ID NO:27,

[0519] (b) one crossFab fragment capable of specific binding to BCMA comprising a heavy chain variable region (VHBCMA) comprising the amino acid sequence of SEQ ID NO:561 and a light chain variable region (V_{L}BCMA) comprising the amino acid sequence of SEQ ID NO:562,

[0520] and (c) a Fc domain composed of a first and a second subunit capable of stable association comprising one or more amino acid substitution that reduces the binding affinity of the antigen binding molecule to an Fc receptor and/or effector function.

[0521] In one aspect, provided is a bispecific agonistic CD28 antigen binding molecule as described herein, comprising

[0522] (a) one crossFab fragment capable of specific binding to CD28,

[0523] (b) one Fab fragment capable of specific binding to BCMA, and

[0524] (c) a Fc domain composed of a first and a second subunit capable of stable association comprising one or more amino acid substitution that reduces the binding affinity of the antigen binding molecule to an Fc receptor and/or effector function.

[0525] In one aspect, provided is a bispecific agonistic CD28 antigen binding molecule as described herein, comprising

[0526] (a) one crossFab fragment capable of specific binding to CD28 comprising

(i) a heavy chain variable region (V_{H}CD28) comprising the amino acid sequence of SEQ ID NO:47 and a light chain variable region (V_{L}CD28) comprising the amino acid sequence of SEQ ID NO:54, or
(ii) a heavy chain variable region (V_{H}CD28) comprising the amino acid sequence of SEQ ID NO:46 and a light chain variable region (V_{L}CD28) comprising the amino acid sequence of SEQ ID NO:53, or
(iii) a heavy chain variable region (V_{H}CD28) comprising the amino acid sequence of SEQ ID NO:42 and a light chain variable region (V_{L}CD28) comprising the amino acid sequence of SEQ ID NO:27,

[0527] (b) one Fab fragment capable of specific binding to BCMA comprising a heavy chain variable region (VHBCMA) comprising the amino acid sequence of SEQ ID NO:561 and a light chain variable region (V_{L}BCMA) comprising the amino acid sequence of SEQ ID NO:562,

[0528] and (c) a Fc domain composed of a first and a second subunit capable of stable association comprising one or more amino acid substitution that reduces the binding affinity of the antigen binding molecule to an Fc receptor and/or effector function.

[0529] In one aspect, the bispecific agonistic CD28 antigen binding molecule comprises a first light chain comprising the amino acid sequence of SEQ ID NO:367, a first heavy chain comprising the amino acid sequence of SEQ ID NO:366, a second heavy chain comprising the amino acid sequence of SEQ ID NO:402 and a second light chain comprising the amino acid sequence of SEQ ID NO:403 (Molecule 16D).

[0530] In one aspect, provided is a bispecific agonistic CD28 antigen binding molecule as described herein, comprising

[0531] (a) one Fab fragment capable of specific binding to CD28,

[0532] (b) one crossFab fragment capable of specific binding to GPRC5D, and

[0533] (c) a Fc domain composed of a first and a second subunit capable of stable association comprising one or more amino acid substitution that reduces the binding affinity of the antigen binding molecule to an Fc receptor and/or effector function.

[0534] In one aspect, provided is a bispecific agonistic CD28 antigen binding molecule as described herein, comprising

[0535] (a) one Fab fragment capable of specific binding to CD28 comprising

(i) a heavy chain variable region (V_{H}CD28) comprising the amino acid sequence of SEQ ID NO:47 and a light chain variable region (V_{L}CD28) comprising the amino acid sequence of SEQ ID NO:54, or
(ii) a heavy chain variable region (V_{H}CD28) comprising the amino acid sequence of SEQ ID NO:46 and a light chain variable region (V_{L}CD28) comprising the amino acid sequence of SEQ ID NO:53, or
(iii) a heavy chain variable region (V_{H}CD28) comprising the amino acid sequence of SEQ ID NO:42 and a light chain variable region (V_{L}CD28) comprising the amino acid sequence of SEQ ID NO:27,

[0536] (b) one crossFab fragment capable of specific binding to GPRC5D comprising a heavy chain variable region (V_{H}GPRC5D) comprising the amino acid sequence of SEQ ID NO:569 and a light chain variable region (V_{L}GPRC5D) comprising the amino acid sequence of SEQ ID NO:570,

[0537] and (c) a Fc domain composed of a first and a second subunit capable of stable association comprising one or more amino acid substitution that reduces the binding affinity of the antigen binding molecule to an Fc receptor and/or effector function.

[0538] In one aspect, the bispecific agonistic CD28 antigen binding molecule comprises a first light chain comprising the amino acid sequence of SEQ ID NO:365, a first heavy chain comprising the amino acid sequence of SEQ ID NO:364, a second heavy chain comprising the amino acid sequence of SEQ ID NO:398 and a second light chain comprising the amino acid sequence of SEQ ID NO:399 (Molecule 16B).

[0539] In one aspect, provided is a bispecific agonistic CD28 antigen binding molecule as described herein, comprising

[0540] (a) one crossFab fragment capable of specific binding to CD28,

[0541] (b) one Fab fragment capable of specific binding to GPRC5D, and

[0542] (c) a Fc domain composed of a first and a second subunit capable of stable association comprising one or more amino acid substitution that reduces the binding affinity of the antigen binding molecule to an Fc receptor and/or effector function.

[0543] In one aspect, provided is a bispecific agonistic CD28 antigen binding molecule as described herein, comprising

[0544] (a) one crossFab fragment capable of specific binding to CD28 comprising

(i) a heavy chain variable region (V_{H}CD28) comprising the amino acid sequence of SEQ ID NO:47 and a light chain variable region (V_{L}CD28) comprising the amino acid sequence of SEQ ID NO:54, or
(ii) a heavy chain variable region (V_{H}CD28) comprising the amino acid sequence of SEQ ID NO:46 and a light chain variable region (V_{L}CD28) comprising the amino acid sequence of SEQ ID NO:53, or
(iii) a heavy chain variable region (V_{H}CD28) comprising the amino acid sequence of SEQ ID NO:42 and a light chain variable region (V_{L}CD28) comprising the amino acid sequence of SEQ ID NO:27,

[0545] (b) one Fab fragment capable of specific binding to GPRC5D comprising a heavy chain variable region (V_{H}GPRC5D) comprising the amino acid sequence of SEQ ID NO:569 and a light chain variable region (V_{L}GPRC5D) comprising the amino acid sequence of SEQ ID NO:570,

[0546] and (c) a Fc domain composed of a first and a second subunit capable of stable association comprising one or more amino acid substitution that reduces the binding affinity of the antigen binding molecule to an Fc receptor and/or effector function.

[0547] In one aspect, the bispecific agonistic CD28 antigen binding molecule comprises a first light chain comprising the amino acid sequence of SEQ ID NO:367, a first heavy chain comprising the amino acid sequence of SEQ ID NO:366, a second heavy chain comprising the amino acid sequence of SEQ ID NO:398 and a second light chain comprising the amino acid sequence of SEQ ID NO:399 (Molecule 16A).

[0548] Bispecific Agonistic CD28 Antigen Binding Molecules Monovalent for Binding to CD28 and Bivalent for Binding to the Tumor-Associated Antigen (1+2 Format)

[0549] In another aspect, a bispecific agonistic CD28 antigen binding molecule as disclosed herein is provided, comprising

[0550] (a) a first Fab fragment capable of specific binding to CD28,

[0551] (b) a second and a third Fab fragment capable of specific binding to a tumor-associated antigen, and

[0552] (c) a Fc domain composed of a first and a second subunit capable of stable association comprising one or more amino acid substitution that reduces the binding affinity of the antigen binding molecule to an Fc receptor and/or effector function,

[0553] wherein the first Fab fragment capable of specific binding to CD28 is fused at the C-terminus of the Fab heavy chain to the N-terminus of the Fab heavy chain of the second Fab fragment capable of specific binding to a tumor-associated antigen, which is in turn fused at its C-terminus to the N-terminus of the first Fc domain subunit, and the third Fab fragment capable of specific binding to a tumor-associated antigen is fused at the C-terminus of the Fab heavy chain to the N-terminus of the second Fc domain subunit.

[0554] In one particular aspect, provided is a bispecific agonistic CD28 antigen binding molecule comprising two light chains, each comprising the amino acid sequence of SEQ ID NO:78, one light chain comprising the amino acid sequence of SEQ ID NO:77, a first heavy chain comprising the amino acid sequence of SEQ ID NO:75, and a second heavy chain comprising the amino acid sequence of SEQ ID NO:76 (Molecule G).

[0555] In one aspect, provided is a bispecific agonistic CD28 antigen binding molecule as described herein, comprising

[0556] (a) a first crossFab fragment capable of specific binding to CD28 comprising

(i) a heavy chain variable region (V_{H}CD28) comprising the amino acid sequence of SEQ ID NO:47 and a light chain variable region (V_{L}CD28) comprising the amino acid sequence of SEQ ID NO:54, or
(ii) a heavy chain variable region (V_{H}CD28) comprising the amino acid sequence of SEQ ID NO:46 and a light chain variable region (V_{L}CD28) comprising the amino acid sequence of SEQ ID NO:53, or
(iii) a heavy chain variable region (V_{H}CD28) comprising the amino acid sequence of SEQ ID NO:42 and a light chain variable region (V_{L}CD28) comprising the amino acid sequence of SEQ ID NO:27,

[0557] (b) a second and a third Fab fragment capable of specific binding to fragment capable of specific binding to CEA comprising

(i) a heavy chain variable region (V_{H}CEA) comprising the amino acid sequence of SEQ ID NO:186 and a light chain variable region (V_{L}CEA) comprising the amino acid sequence of SEQ ID NO: 187, or
(ii) a heavy chain variable region (V_{H}CEA) comprising the amino acid sequence of SEQ ID NO:200 and a light chain variable region (V_{L}CEA) comprising the amino acid sequence of SEQ ID NO:201, or
(iii) a heavy chain variable region (V_{H}CEA) comprising the amino acid sequence of SEQ ID NO:513 and a light chain variable region (V_{L}CEA) comprising the amino acid sequence of SEQ ID NO:514,

[0558] and (c) a Fc domain composed of a first and a second subunit capable of stable association comprising one or more amino acid substitution that reduces the binding affinity of the antigen binding molecule to an Fc receptor and/or effector function.

[0559] In one particular aspect, provided is a bispecific agonistic CD28 antigen binding molecule comprising two light chains, each comprising the amino acid sequence of SEQ ID NO:361, one light chain comprising the amino acid sequence of SEQ ID NO:368, a first heavy chain comprising the amino acid sequence of SEQ ID NO:362, and a second heavy chain comprising the amino acid sequence of SEQ ID NO:373 (Molecule 11P).

[0560] In one particular aspect, provided is a bispecific agonistic CD28 antigen binding molecule comprising two light chains, each comprising the amino acid sequence of SEQ ID NO:361, one light chain comprising the amino acid sequence of SEQ ID NO:368, a first heavy chain comprising the amino acid sequence of SEQ ID NO:360, and a second heavy chain comprising the amino acid sequence of SEQ ID NO:374 (Molecule 11Q).

[0561] FAP- and CEA-Targeting Agonistic CD28 Antigen Binding Molecules

[0562] Herein provided is also a bispecific agonistic CD28 antigen binding molecule with monovalent binding to CD28, comprising

(a) one antigen binding domains capable of specific binding to CD28,
(b) one antigen binding domain capable of specific binding to a first tumor-associated antigen, and
(c) an Fc domain composed of a first and a second subunit capable of stable association comprising one or more amino acid substitution that reduces the binding affinity of the antigen binding molecule to an Fc receptor and/or effector function, characterized in that it additionally comprises one antigen binding domain capable of specific binding to a second tumor-associated antigen.

[0563] In one particular aspect, provided is a trispecific agonistic CD28 antigen binding molecule with monovalent binding to CD28, comprising

(a) one antigen binding domains capable of specific binding to CD28,
(b) one antigen binding domain capable of specific binding to CEA and one antigen binding domain capable of specific binding to FAP,
(c) an Fc domain composed of a first and a second subunit capable of stable association comprising one or more amino acid substitution that reduces the binding affinity of the antigen binding molecule to an Fc receptor and/or effector function.

[0564] In one particular aspect, provided is a bispecific agonistic CD28 antigen binding molecule comprising a first light chain comprising the amino acid sequence of SEQ ID NO:88, a first heavy chain comprising the amino acid sequence of SEQ ID NO:87, a second heavy chain comprising the amino acid sequence of SEQ ID NO:388 and a second light chain comprising the amino acid sequence of SEQ ID NO:389 (Molecule Y).

[0565] B Cell Surface Antigen-Targeting Bispecific Agonistic CD28 Antigen Binding Molecules

[0566] The invention provides novel bispecific agonistic CD28 antigen binding molecules with particularly advantageous properties such as producibility, stability, binding affinity, biological activity, targeting efficiency, reduced toxicity, an extended dosage range that can be given to a patient and thereby a possibly enhanced efficacy. The novel bispecific agonistic CD28 antigen binding molecules comprise an Fc domain composed of a first and a second subunit capable of stable association comprising one or more amino acid substitution that reduces the binding affinity of the antigen binding molecule to an Fc receptor and/or effector function (Fc silent) and thus unspecific cross-linking via Fc receptors is avoided. Instead, they comprise at least one antigen binding domain capable of specific binding to a B cell surface antigen such as CD19 or CD79b which causes cross-linking in the presence of CD19- or CD79b-expressing B cells. Thus, specific T cell activation in the presence of CD19- or CD79b-expressing B cells is achieved.

[0567] Herein provided is a bispecific agonistic CD28 antigen binding molecule comprising an antigen binding domain capable of specific binding to CD28, an antigen binding domain capable of specific binding to a B cell surface antigen, and a Fc domain composed of a first and a second subunit capable of stable association comprising one or more amino acid substitution that reduces the binding affinity of the antigen binding molecule to an Fc receptor and/or effector function. In one aspect, the bispecific agonistic CD28 antigen binding molecule as described herein is characterized by monovalent binding to CD28. In a further aspect, the bispecific agonistic CD28 antigen binding molecule as described herein is characterized by monovalent binding to the B cell surface antigen.

[0568] In one aspect, a bispecific agonistic CD28 antigen binding molecule as defined herein before is provided, wherein the Fc domain is an IgG, particularly an IgG1 Fc domain or an IgG4 Fc domain. In one particular aspect, the Fc domain composed of a first and a second subunit capable of stable association is an IgG1 Fc domain. The Fc domain comprises one or more amino acid substitution that reduces the binding affinity of the antigen binding molecule to an Fc receptor and/or reduces or abolishes effector function. In one aspect, the Fc domain comprises the amino acid substitutions L234A and L235A (numbering according to Kabat EU index). In one aspect, the Fc domain is of human IgG1 subclass and comprises the amino acid mutations L234A, L235A and P329G (numbering according to Kabat EU index).

[0569] In one aspect, provided is a bispecific agonistic CD28 antigen binding molecule as defined herein before, wherein the antigen binding domain capable of specific binding to CD28 comprises

(i) a heavy chain variable region (V_{H}CD28) comprising a heavy chain complementary determining region CDR-H1 of SEQ ID NO: 20, a CDR-H2 of SEQ ID NO: 21, and a CDR-H3 of SEQ ID NO: 22, and a light chain variable region (V_{L}CD28) comprising a light chain complementary determining region CDR-L1 of SEQ ID NO: 23, a CDR-L2 of SEQ ID NO: 24 and a CDR-L3 of SEQ ID NO: 25; or
(ii) a heavy chain variable region (V_{H}CD28) comprising a CDR-H1 of SEQ ID NO: 36, a CDR-H2 of SEQ ID NO: 37, and a CDR-H3 of SEQ ID NO: 38, and a light chain variable region (V_{L}CD28) comprising a CDR-L1 of SEQ ID NO: 39, a CDR-L2 of SEQ ID NO: 40 and a CDR-L3 of SEQ ID NO: 41.

[0570] In one aspect, the antigen binding domain capable of specific binding to CD28 of the bispecific agonistic CD28 antigen binding molecule comprises a heavy chain variable region (V_{H}CD28) comprising a CDR-H1 of SEQ ID NO:20, a CDR-H2 of SEQ ID NO:21, and a CDR-H3 of SEQ ID NO:22, and a light chain variable region (V_{L}CD28) comprising a CDR-L1 of SEQ ID NO:23, a CDR-L2 of SEQ ID NO:24 and a CDR-L3 of SEQ ID NO:25. In one aspect, provided is a bispecific agonistic CD28 antigen binding molecule as defined herein before, wherein the antigen binding domain capable of specific binding to CD28 comprises a heavy chain variable region (V_{H}CD28) comprising an amino acid sequence that is at least about 95%, 96%, 97%, 98%, 99% or 100% identical to the amino acid sequence of SEQ ID NO:26, and a light chain variable region (V_{L}CD28) comprising an amino acid sequence that is at least about 95%, 96%, 97%, 98%, 99% or 100% identical to the amino acid sequence of SEQ ID NO:27. In one aspect, the antigen binding domain capable of specific binding to CD28 comprises a heavy chain variable region (V_{H}CD28) comprising the amino acid sequence of SEQ ID NO:26 and a light chain variable region (V_{L}CD28) comprising the amino acid sequence of SEQ ID NO:27.

[0571] In another aspect, the antigen binding domain capable of specific binding to CD28 of the bispecific agonistic CD28 antigen binding molecule comprises a heavy chain variable region (V_{H}CD28) comprising a CDR-H1 of SEQ ID NO: 28, a CDR-H2 of SEQ ID NO: 29, and a CDR-H3 of SEQ ID NO: 30, and a light chain variable region (V_{L}CD28) comprising a CDR-L1 of SEQ ID NO: 31, a CDR-L2 of SEQ ID NO:32 and a CDR-L3 of SEQ ID NO:33. In one aspect, provided is a bispecific agonistic CD28 antigen binding molecule as defined herein before, wherein the antigen binding domain capable of specific binding to CD28 comprises a heavy chain variable region (V_{H}CD28) comprising an amino acid sequence that is at least about 95%, 96%, 97%, 98%, 99% or 100% identical to the amino acid sequence of SEQ ID NO:34, and a light chain variable region (V_{L}CD28) comprising an amino acid sequence that is at least about 95%, 96%, 97%, 98%, 99% or 100% identical to the amino acid sequence of SEQ ID NO:35. In one aspect, the antigen binding domain capable of specific binding to CD28 comprises a heavy chain variable region (V_{H}CD28) comprising the amino acid sequence of SEQ ID NO:34 and a light chain variable region (V_{L}CD28) comprising the amino acid sequence of SEQ ID NO:35.

[0572] In another aspect, the antigen binding domain capable of specific binding to CD28 of the bispecific agonistic CD28 antigen binding molecule comprises a heavy chain variable region (V_{H}CD28) comprising a CDR-H1 of SEQ ID NO: 36, a CDR-H2 of SEQ ID NO: 37, and a CDR-H3 of SEQ ID NO: 38, and a light chain variable region (V_{L}CD28) comprising a CDR-L1 of SEQ ID NO: 39, a CDR-L2 of SEQ ID NO: 40 and a CDR-L3 of SEQ ID NO: 41.

[0573] In a further aspect, a bispecific agonistic CD28 antigen binding molecule is provided, wherein the antigen binding domain capable of specific binding to CD28 comprises a heavy chain variable region (V_{H}CD28) comprising an amino acid sequence selected from the group consisting of SEQ ID NO:42, SEQ ID NO:43, SEQ ID NO:44, SEQ ID NO:45, SEQ ID NO:46, SEQ ID NO:47, SEQ ID NO:48, SEQ ID NO:49, SEQ ID NO:50 and SEQ ID NO:51, and a light chain variable region (V_{L}CD28) comprising an amino acid sequence selected from the group consisting of SEQ ID NO:27, SEQ ID NO:52, SEQ ID NO:53, SEQ ID NO:54, SEQ ID NO:55, SEQ ID NO:56, SEQ ID NO:57, SEQ ID NO:58, SEQ ID NO:59, SEQ ID NO:60 and SEQ ID NO:61.

[0574] In another aspect, provided is bispecific agonistic CD28 antigen binding molecule, wherein the antigen binding domain capable of specific binding to CD28 comprises

[0575] (a) a heavy chain variable region (V_{H}CD28) comprising the amino acid sequence of SEQ ID NO:47 and a light chain variable region (V_{L}CD28) comprising the amino acid sequence of SEQ ID NO:54, or

[0576] (b) a heavy chain variable region (V_{H}CD28) comprising the amino acid sequence of SEQ ID NO:47 and a light chain variable region (V_{L}CD28) comprising the amino acid sequence of SEQ ID NO:27, or

[0577] (c) a heavy chain variable region (V_{H}CD28) comprising the amino acid sequence of SEQ ID NO:51 and a light chain variable region (V_{L}CD28) comprising the amino acid sequence of SEQ ID NO:61, or

[0578] (d) a heavy chain variable region (V_{H}CD28) comprising the amino acid sequence of SEQ ID NO:46 and a light chain variable region (V_{L}CD28) comprising the amino acid sequence of SEQ ID NO:53, or

[0579] (e) a heavy chain variable region (V_{H}CD28) comprising the amino acid sequence of SEQ ID NO:46 and a light chain variable region (V_{L}CD28) comprising the amino acid sequence of SEQ ID NO:54, or

[0580] (f) a heavy chain variable region (V_{H}CD28) comprising the amino acid sequence of SEQ ID NO:46 and a light chain variable region (V_{L}CD28) comprising the amino acid sequence of SEQ ID NO:59, or

[0581] (g) a heavy chain variable region (V_{H}CD28) comprising the amino acid sequence of SEQ ID NO:46 and a light chain variable region (V_{L}CD28) comprising the amino acid sequence of SEQ ID NO:27, or

[0582] (h) a heavy chain variable region (V_{H}CD28) comprising the amino acid sequence of SEQ ID NO:43 and a light chain variable region (V_{L}CD28) comprising the amino acid sequence of SEQ ID NO:27, or

[0583] (i) a heavy chain variable region (V_{H}CD28) comprising the amino acid sequence of SEQ ID NO:42 and a light chain variable region (V_{L}CD28) comprising the amino acid sequence of SEQ ID NO:53, or

[0584] (j) a heavy chain variable region (V_{H}CD28) comprising the amino acid sequence of SEQ ID NO:42 and a light chain variable region (V_{L}CD28) comprising the amino acid sequence of SEQ ID NO:59, or

[0585] (k) a heavy chain variable region (V_{H}CD28) comprising the amino acid sequence of SEQ ID NO:42 and a light chain variable region (V_{L}CD28) comprising the amino acid sequence of SEQ ID NO:27.

[0586] In one aspect, the bispecific agonistic CD28 antigen binding molecule comprises an antigen binding domain capable of specific binding to CD28 comprising a heavy chain variable region (V_{H}CD28) comprising the amino acid sequence of SEQ ID NO:46 and a light chain variable region (V_{L}CD28) comprising the amino acid sequence of SEQ ID NO:53, or a heavy chain variable region (V_{H}CD28) comprising the amino acid sequence of SEQ ID NO:47 and a light chain variable region (V_{L}CD28) comprising the amino acid sequence of SEQ ID NO:54, or a heavy chain variable region (V_{H}CD28) comprising the amino acid sequence of SEQ ID NO:47 and a light chain variable region (V_{L}CD28) comprising the amino acid sequence of SEQ ID NO:27, or a heavy chain variable region (V_{H}CD28) comprising the amino acid sequence of SEQ ID NO:42 and a light chain variable region (V_{L}CD28) comprising the amino acid sequence of SEQ ID NO:27. In one particular aspect, a bispecific agonistic CD28 antigen binding molecule is provided, wherein the antigen binding domain capable of specific binding to CD28 comprises a heavy chain variable region (V_{H}CD28) comprising the amino acid sequence of SEQ ID NO:46 and a light chain variable region (V_{L}CD28) comprising the amino acid sequence of SEQ ID NO:53. In another particular aspect, a bispecific agonistic CD28 antigen binding molecule is provided, wherein the antigen binding domain capable of specific binding to CD28 comprises a heavy chain variable region (V_{H}CD28) comprising the amino acid sequence of SEQ ID NO:47 and a light chain variable region (V_{L}CD28) comprising the amino acid sequence of SEQ ID NO:54. In further particular aspect, a bispecific agonistic CD28 antigen binding molecule is provided, wherein the antigen binding domain capable of specific binding to CD28 comprises a heavy chain variable region (V_{H}CD28) comprising the amino acid sequence of SEQ ID NO:47 and a light chain variable region (V_{L}CD28) comprising the amino acid sequence of SEQ ID NO:27. In yet another particular aspect, a bispecific agonistic CD28 antigen binding molecule is provided, wherein the antigen binding domain capable of specific binding to CD28 comprises a heavy chain variable region (V_{H}CD28) comprising the amino acid sequence of SEQ ID NO:42 and a light chain variable region (V_{L}CD28) comprising the amino acid sequence of SEQ ID NO:27.

[0587] In one aspect, a bispecific agonistic CD28 antigen binding molecule is provided, wherein the antigen binding domain capable of specific binding to B cell surface antigen is an antigen binding domain capable of specific binding to CD19.

[0588] In one aspect, provided is a bispecific agonistic CD28 antigen binding molecule as described herein, wherein the antigen binding domain capable of specific binding to CD19 comprises (a) a heavy chain variable region (V_{H}CD19) comprising (i) CDR-H1 comprising the amino acid sequence of SEQ ID NO:406, (ii) CDR-H2 comprising the amino acid sequence of SEQ ID NO:407, and (iii) CDR-H3 comprising the amino acid sequence of SEQ ID NO:408, and a light chain variable region (V_{L}CD19) comprising (iv) CDR-L1 comprising the amino acid sequence of SEQ ID NO:409, (v) CDR-L2 comprising the amino acid sequence of SEQ ID NO:410, and (vi) CDR-L3 comprising the amino acid sequence of SEQ ID NO:411, or (b) a heavy chain variable region (V_{H}CD19) comprising (i) CDR-H1 comprising the amino acid sequence of SEQ ID NO:414, (ii) CDR-H2 comprising the amino acid sequence of SEQ ID NO:415, and (iii) CDR-H3 comprising the amino acid sequence of SEQ ID NO:416, and a light chain variable region (V_{L}CD19) comprising (iv) CDR-L1 comprising the amino acid sequence of SEQ ID NO:417, (v) CDR-L2 comprising the amino acid sequence of SEQ ID NO:418, and (vi) CDR-L3 comprising the amino acid sequence of SEQ ID NO:419. Particularly, the antigen binding domain capable of specific binding to CD19 comprises (a) a heavy chain variable region (V_{H}CD19) comprising an amino acid sequence that is at least about 95%, 98% or 100% identical to the amino acid sequence of SEQ ID NO:412, and a light chain variable region (V_{L}CD19) comprising an amino acid sequence that is at least about 95%, 98% or 100% identical to the amino acid sequence of SEQ ID NO:413, or (b) a heavy chain variable region (V_{H}CD19) comprising an amino acid sequence that is at least about 95%, 98% or 100% identical to the amino acid sequence of SEQ ID NO:420, and a light chain variable region (V_{L}CD19) comprising an amino acid sequence that is at least about 95%, 98% or 100% identical to the amino acid sequence of SEQ ID NO:421. In one particular aspect, the the antigen binding domain capable of specific binding to CD19 comprises a heavy chain variable region (V_{H}CD19) comprising an amino acid sequence of SEQ ID NO:412 and a light chain variable region (V_{L}CD19) comprising an amino acid sequence of SEQ ID NO:413.

[0589] In another aspect, a bispecific agonistic CD28 antigen binding molecule is provided, wherein the antigen binding domain capable of specific binding to a B cell surface antigen is an antigen binding domain capable of specific binding to CD79b.

[0590] In one aspect, provided is a bispecific agonistic CD28 antigen binding molecule as described herein, wherein the antigen binding domain capable of specific binding to CD79b comprises a heavy chain variable region (V_{H}CD79b) comprising (i) CDR-H1 comprising the amino acid sequence of SEQ ID NO:422, (ii) CDR-H2 comprising the amino acid sequence of SEQ ID NO:423, and (iii) CDR-H3 comprising the amino acid sequence of SEQ ID NO:424, and a light chain variable region (V_{L}CD79b) comprising (iv) CDR-L1 comprising the amino acid sequence of SEQ ID NO:425, (v) CDR-L2 comprising the amino acid sequence of SEQ ID NO:426, and (vi) CDR-L3 comprising the amino acid sequence of SEQ ID NO:427. In particular, the antigen binding domain capable of specific binding to CD79b comprises a heavy chain variable region (V_{H}CD79b) comprising an amino acid sequence that is at least about 95%, 98%, or 100% identical to the amino acid sequence of SEQ ID NO:428, and a light chain variable region (V_{L}CD79b) comprising an amino acid sequence that is at least about 95%, 98% or 100% identical to the amino acid sequence of SEQ ID NO:429. In one aspect, the antigen binding domain capable of specific binding to CD79b comprises a heavy chain variable region (V_{H}CD79b) comprising the amino acid sequence of SEQ ID NO:428, and a light chain variable region (V_{L}CD79b) comprising the amino acid sequence of SEQ ID NO:429.

[0591] In a further aspect, provided is a bispecific agonistic CD28 antigen binding molecule as defined herein before, wherein the antigen binding domain capable of specific binding to CD28 is a Fab fragment or a crossFab fragment. In one particular aspect, the antigen binding domain capable of specific binding to CD28 is a Fab fragment and the antigen binding domain capable of specific binding to a B cell surface antigen is a crossFab fragment.

[0592] Bispecific Agonistic CD28 Antigen Binding Molecules Monovalent for Binding to CD28 and Monovalent for Binding to a B Cell Surface Antigen (1+1 Format)

[0593] In another aspect, provided is a bispecific agonistic CD28 antigen binding molecule as described herein, comprising

[0594] (a) one Fab fragment capable of specific binding to CD28,

[0595] (b) one crossFab fragment capable of specific binding to a B cell surface antigen, and

[0596] (c) a Fc domain composed of a first and a second subunit capable of stable association comprising one or more amino acid substitution that reduces the binding affinity of the antigen binding molecule to an Fc receptor and/or effector function.

[0597] In one aspect, provided is a bispecific agonistic CD28 antigen binding molecule as described herein, comprising

[0598] (a) one Fab fragment capable of specific binding to CD28,

[0599] (b) one crossFab fragment capable of specific binding to CD19, and

[0600] (c) a Fc domain composed of a first and a second subunit capable of stable association comprising one or more amino acid substitution that reduces the binding affinity of the antigen binding molecule to an Fc receptor and/or effector function.

[0601] In one aspect, provided is a bispecific agonistic CD28 antigen binding molecule as described herein, comprising

[0602] (a) one Fab fragment capable of specific binding to CD28 comprising

(i) a heavy chain variable region (V_{H}CD28) comprising the amino acid sequence of SEQ ID NO:47 and a light chain variable region (V_{L}CD28) comprising the amino acid sequence of SEQ ID NO:54, or
(ii) a heavy chain variable region (V_{H}CD28) comprising the amino acid sequence of SEQ ID NO:46 and a light chain variable region (V_{L}CD28) comprising the amino acid sequence of SEQ ID NO:53, or
(iii) a heavy chain variable region (V_{H}CD28) comprising the amino acid sequence of SEQ ID NO:42 and a light chain variable region (V_{L}CD28) comprising the amino acid sequence of SEQ ID NO:27,

[0603] (b) one crossFab fragment capable of specific binding to CD19 comprising

(i) a heavy chain variable region (V_{H}CD19) comprising the amino acid sequence of SEQ ID NO:412 and a light chain variable region (V_{L}CD19) comprising the amino acid sequence of SEQ ID NO:413, or
(ii) a heavy chain variable region (V_{H}CD19) comprising the amino acid sequence of SEQ ID NO:420 and a light chain variable region (V_{L}CD19) comprising the amino acid sequence of SEQ ID NO:421,

[0604] and (c) a Fc domain composed of a first and a second subunit capable of stable association comprising one or more amino acid substitution that reduces the binding affinity of the antigen binding molecule to an Fc receptor and/or effector function.

[0605] In one aspect, provided is a bispecific agonistic CD28 antigen binding molecule comprising a first light chain comprising the amino acid sequence of SEQ ID NO:65, a first heavy chain comprising the amino acid sequence of SEQ ID NO: 118, a second heavy chain comprising the amino acid sequence of SEQ ID NO:430 and a second light chain comprising the amino acid sequence of SEQ ID NO:431 (Molecule 18A).

[0606] In one particular aspect, provided is a bispecific agonistic CD28 antigen binding molecule comprising a first light chain comprising the amino acid sequence of SEQ ID NO: 121, a first heavy chain comprising the amino acid sequence of SEQ ID NO: 116, a second heavy chain comprising the amino acid sequence of SEQ ID NO:430 and a second light chain comprising the amino acid sequence of SEQ ID NO:431 (Molecule 18B).

[0607] In another particular aspect, provided is a bispecific agonistic CD28 antigen binding molecule comprising a first light chain comprising the amino acid sequence of SEQ ID NO: 122, a first heavy chain comprising the amino acid sequence of SEQ ID NO: 114, a second heavy chain comprising the amino acid sequence of SEQ ID NO:430 and a second light chain comprising the amino acid sequence of SEQ ID NO:431 (Molecule 18C).

[0608] In one further aspect, provided is a bispecific agonistic CD28 antigen binding molecule comprising a first light chain comprising the amino acid sequence of SEQ ID NO:65, a first heavy chain comprising the amino acid sequence of SEQ ID NO: 114, a second heavy chain comprising the amino acid sequence of SEQ ID NO:430 and a second light chain comprising the amino acid sequence of SEQ ID NO:431 (Molecule 18D).

[0609] In yet another aspect, provided is a bispecific agonistic CD28 antigen binding molecule comprising a first light chain comprising the amino acid sequence of SEQ ID NO: 123, a first heavy chain comprising the amino acid sequence of SEQ ID NO: 118, a second heavy chain comprising the amino acid sequence of SEQ ID NO:430 and a second light chain comprising the amino acid sequence of SEQ ID NO:431 (Molecule 18E).

[0610] In another aspect, provided is a bispecific agonistic CD28 antigen binding molecule as described herein, comprising

[0611] (a) one crossFab fragment capable of specific binding to CD28,

[0612] (b) one Fab fragment capable of specific binding to CD19, and

[0613] (c) a Fc domain composed of a first and a second subunit capable of stable association comprising one or more amino acid substitution that reduces the binding affinity of the antigen binding molecule to an Fc receptor and/or effector function.

[0614] In one aspect, provided is a bispecific agonistic CD28 antigen binding molecule as described herein, comprising

[0615] (a) one crossFab fragment capable of specific binding to CD28 comprising

(i) a heavy chain variable region (V_{H}CD28) comprising the amino acid sequence of SEQ ID NO:47 and a light chain variable region (V_{L}CD28) comprising the amino acid sequence of SEQ ID NO:54, or
(ii) a heavy chain variable region (V_{H}CD28) comprising the amino acid sequence of SEQ ID NO:46 and a light chain variable region (V_{L}CD28) comprising the amino acid sequence of SEQ ID NO:53, or
(iii) a heavy chain variable region (V_{H}CD28) comprising the amino acid sequence of SEQ ID NO:42 and a light chain variable region (V_{L}CD28) comprising the amino acid sequence of SEQ ID NO:27,

[0616] (b) one Fab fragment capable of of specific binding to CD19 comprising

(i) a heavy chain variable region (V_{H}CD19) comprising the amino acid sequence of SEQ ID NO:412 and a light chain variable region (V_{L}CD19) comprising the amino acid sequence of SEQ ID NO:413, or
(ii) a heavy chain variable region (V_{H}CD19) comprising the amino acid sequence of SEQ ID NO:420 and a light chain variable region (V_{L}CD19) comprising the amino acid sequence of SEQ ID NO:421,

[0617] and (c) a Fc domain composed of a first and a second subunit capable of stable association comprising one or more amino acid substitution that reduces the binding affinity of the antigen binding molecule to an Fc receptor and/or effector function.

[0618] In one aspect, provided is a bispecific agonistic CD28 antigen binding molecule as described herein, comprising

[0619] (a) one Fab fragment capable of specific binding to CD28,

[0620] (b) one crossFab fragment capable of specific binding to CD79b, and

[0621] (c) a Fc domain composed of a first and a second subunit capable of stable association comprising one or more amino acid substitution that reduces the binding affinity of the antigen binding molecule to an Fc receptor and/or effector function.

[0622] In one aspect, provided is a bispecific agonistic CD28 antigen binding molecule as described herein, comprising

[0623] (a) one Fab fragment capable of specific binding to CD28 comprising

(i) a heavy chain variable region (V_{H}CD28) comprising the amino acid sequence of SEQ ID NO:47 and a light chain variable region (V_{L}CD28) comprising the amino acid sequence of SEQ ID NO:54, or
(ii) a heavy chain variable region (V_{H}CD28) comprising the amino acid sequence of SEQ ID NO:46 and a light chain variable region (V_{L}CD28) comprising the amino acid sequence of SEQ ID NO:53, or
(iii) a heavy chain variable region (V_{H}CD28) comprising the amino acid sequence of SEQ ID NO:42 and a light chain variable region (V_{L}CD28) comprising the amino acid sequence of SEQ ID NO:27,

[0624] (b) one crossFab fragment capable of specific binding to CD79b comprising a heavy chain variable region (V_{H}CD79b) comprising the amino acid sequence of SEQ ID NO:428 and a light chain variable region (V_{L}CD79b) comprising the amino acid sequence of SEQ ID NO:429,

[0625] and (c) a Fc domain composed of a first and a second subunit capable of stable association comprising one or more amino acid substitution that reduces the binding affinity of the antigen binding molecule to an Fc receptor and/or effector function.

[0626] In one particular aspect, provided is a bispecific agonistic CD28 antigen binding molecule comprising a first light chain comprising the amino acid sequence of SEQ ID NO: 121, a first heavy chain comprising the amino acid sequence of SEQ ID NO: 116, a second heavy chain comprising the amino acid sequence of SEQ ID NO:432 and a second light chain comprising the amino acid sequence of SEQ ID NO:433 (Molecule 18F).

[0627] In another aspect, provided is a bispecific agonistic CD28 antigen binding molecule as described herein, comprising

[0628] (a) one crossFab fragment capable of specific binding to CD28,

[0629] (b) one Fab fragment capable of specific binding to CD19, and

[0630] (c) a Fc domain composed of a first and a second subunit capable of stable association comprising one or more amino acid substitution that reduces the binding affinity of the antigen binding molecule to an Fc receptor and/or effector function.

[0631] In one aspect, provided is a bispecific agonistic CD28 antigen binding molecule as described herein, comprising

[0632] (a) one crossFab fragment capable of specific binding to CD28 comprising

(i) a heavy chain variable region (V_{H}CD28) comprising the amino acid sequence of SEQ ID NO:47 and a light chain variable region (V_{L}CD28) comprising the amino acid sequence of SEQ ID NO:54, or
(ii) a heavy chain variable region (V_{H}CD28) comprising the amino acid sequence of SEQ ID NO:46 and a light chain variable region (V_{L}CD28) comprising the amino acid sequence of SEQ ID NO:53, or
(iii) a heavy chain variable region (V_{H}CD28) comprising the amino acid sequence of SEQ ID NO:42 and a light chain variable region (V_{L}CD28) comprising the amino acid sequence of SEQ ID NO:27,

[0633] (b) one Fab fragment capable of of specific binding to CD79b comprising a heavy chain variable region (V_{H}CD79b) comprising the amino acid sequence of SEQ ID NO:428 and a light chain variable region (V_{L}CD79b) comprising the amino acid sequence of SEQ ID NO:429,

[0634] and (c) a Fc domain composed of a first and a second subunit capable of stable association comprising one or more amino acid substitution that reduces the binding affinity of the antigen binding molecule to an Fc receptor and/or effector function.

[0635] Bispecific Agonistic CD28 Antigen Binding Molecules Monovalent for Binding to CD28 and Bivalent for Binding to a B Cell Surface Antigen (1+2 Format)

[0636] In one aspect, the bispecific agonistic CD28 antigen binding molecule is characterized by bivalent binding to to the B cell surface antigen.

[0637] In another aspect, a bispecific agonistic CD28 antigen binding molecule as disclosed herein is provided, comprising

[0638] (a) a first Fab fragment capable of specific binding to CD28,

[0639] (b) a second and a third Fab fragment capable of specific binding to a B cell surface antigen, and

[0640] (c) a Fc domain composed of a first and a second subunit capable of stable association comprising one or more amino acid substitution that reduces the binding affinity of the antigen binding molecule to an Fc receptor and/or effector function,

[0641] wherein the first Fab fragment capable of specific binding to CD28 is fused at the C-terminus of the Fab heavy chain to the N-terminus of the Fab heavy chain of the second Fab fragment capable of specific binding to a tumor-associated antigen, which is in turn fused at its C-terminus to the N-terminus of the first Fc domain subunit, and the third Fab fragment capable of specific binding to a tumor-associated antigen is fused at the C-terminus of the Fab heavy chain to the N-terminus of the second Fc domain subunit.

[0642] Fc Domain Modifications Reducing Fc Receptor Binding and/or Effector Function

[0643] The Fc domain of the bispecific agonistic CD28 antigen binding molecule of the invention consists of a pair of polypeptide chains comprising heavy chain domains of an immunoglobulin molecule. For example, the Fc domain of an immunoglobulin G (IgG) molecule is a dimer, each subunit of which comprises the CH2 and CH3 IgG heavy chain constant domains. The two subunits of the Fc domain are capable of stable association with each other. The Fc domain confers favorable pharmacokinetic properties to the antigen binding molecules of the invention, including a long serum half-life which contributes to good accumulation in the target tissue and a favorable tissue-blood distribution ratio. On the other side, it may, however, lead to undesirable targeting of the bispecific antibodies of the invention to cells expressing Fc receptors rather than to the preferred antigen-bearing cells.

[0644] Accordingly, the Fc domain of the bispecific agonistic CD28 antigen binding molecule of the invention exhibits reduced binding affinity to an Fc receptor and/or reduced effector function, as compared to a native IgG1 Fc domain. In one aspect, the Fc does not substantially bind to an Fc receptor and/or does not induce effector function. In a particular aspect the Fc receptor is an Fcγ receptor. In one aspect, the Fc receptor is a human Fc receptor. In a specific aspect, the Fc receptor is an activating human Fcγ receptor, more specifically human FcγRIIIa, FcγRI or FcγRIIa, most specifically human FcγRIIIa. In one aspect, the Fc domain does not induce effector function. The reduced effector function can include, but is not limited to, one or more of the following: reduced complement dependent cytotoxicity (CDC), reduced antibody-dependent cell-mediated cytotoxicity (ADCC), reduced antibody-dependent cellular phagocytosis (ADCP), reduced cytokine secretion, reduced immune complex-mediated antigen uptake by antigen-presenting cells, reduced binding to NK cells, reduced binding to macrophages, reduced binding to monocytes, reduced binding to polymorphonuclear cells, reduced direct signaling inducing apoptosis, reduced dendritic cell maturation, or reduced T cell priming.

[0645] In certain aspects, one or more amino acid modifications may be introduced into the Fc region of an antibody provided herein, thereby generating an Fc region variant. The Fc region variant may comprise a human Fc region sequence (e.g., a human IgG1, IgG2, IgG3 or IgG4 Fc region) comprising an amino acid modification (e.g. a substitution) at one or more amino acid positions.

[0646] In one particular aspect, the invention provides an antigen binding molecule, wherein the Fc region comprises one or more amino acid substitution that reduces binding to an Fc receptor, in particular towards Fcγ receptor. In one aspect, the invention provides an antibody, wherein the Fc region comprises one or more amino acid substitution and wherein the ADCC induced by the antibody is reduced to 0-20% of the ADCC induced by an antibody comprising the wild-type human IgG1 Fc region.

[0647] In one aspect, the Fc domain of the antigen binding molecule of the invention comprises one or more amino acid mutation that reduces the binding affinity of the Fc domain to an Fc receptor and/or effector function. Typically, the same one or more amino acid mutation is present in each of the two subunits of the Fc domain. In particular, the Fc domain comprises an amino acid substitution at a position of E233, L234, L235, N297, P331 and P329 (EU numbering). In particular, the Fc domain comprises amino acid substitutions at positions 234 and 235 (EU numbering) and/or 329 (EU numbering) of the IgG heavy chains. More particularly, provided is an antigen binding molecule according to the invention which comprises an Fc domain with the amino acid substitutions L234A, L235A and P329G (“P329G LALA”, EU numbering) in the IgG heavy chains. The amino acid substitutions L234A and L235A refer to the so-called LALA mutation. The “P329G LALA” combination of amino acid substitutions almost completely abolishes Fcγ receptor binding of a human IgG1 Fc domain and is described in International Patent Appl. Publ. No. WO 2012/130831 A1 which also describes methods of preparing such mutant Fc domains and methods for determining its properties such as Fc receptor binding or effector functions.

[0648] Fc domains with reduced Fc receptor binding and/or effector function also include those with substitution of one or more of Fc domain residues 238, 265, 269, 270, 297, 327 and 329 (U.S. Pat. No. 6,737,056). Such Fc mutants include Fc mutants with substitutions at two or more of amino acid positions 265, 269, 270, 297 and 327, including the so-called “DANA” Fc mutant with substitution of residues 265 and 297 to alanine (U.S. Pat. No. 7,332,581).

[0649] In another aspect, the Fc domain is an IgG4 Fc domain. IgG4 antibodies exhibit reduced binding affinity to Fc receptors and reduced effector functions as compared to IgG1 antibodies. In a more specific aspect, the Fc domain is an IgG4 Fc domain comprising an amino acid substitution at position S228 (Kabat numbering), particularly the amino acid substitution S228P. In a more specific aspect, the Fc domain is an IgG4 Fc domain comprising amino acid substitutions L235E and S228P and P329G (EU numbering). Such IgG4 Fc domain mutants and their Fcγ receptor binding properties are also described in WO 2012/130831.

[0650] Mutant Fc domains can be prepared by amino acid deletion, substitution, insertion or modification using genetic or chemical methods well known in the art. Genetic methods may include site-specific mutagenesis of the encoding DNA sequence, PCR, gene synthesis, and the like. The correct nucleotide changes can be verified for example by sequencing.

[0651] Binding to Fc receptors can be easily determined e.g. by ELISA, or by Surface Plasmon Resonance (SPR) using standard instrumentation such as a BIAcore instrument (GE Healthcare), and Fc receptors such as may be obtained by recombinant expression. Alternatively, binding affinity of Fc domains or cell activating antibodies comprising an Fc domain for Fc receptors may be evaluated using cell lines known to express particular Fc receptors, such as human NK cells expressing FcγIIIa receptor.

[0652] Effector function of an Fc domain, or antigen binding molecules of the invention comprising an Fc domain, can be measured by methods known in the art. A suitable assay for measuring ADCC is described herein. Other examples of in vitro assays to assess ADCC activity of a molecule of interest are described in U.S. Pat. No. 5,500,362; Hellstrom et al. Proc Natl Acad Sci USA 83, 7059-7063 (1986) and Hellstrom et al., Proc Natl Acad Sci USA 82, 1499-1502 (1985); U.S. Pat. No. 5,821,337; Bruggemann et al., J Exp Med 166, 1351-1361 (1987). Alternatively, non-radioactive assays methods may be employed (see, for example, ACTI™ non-radioactive cytotoxicity assay for flow cytometry (CellTechnology, Inc. Mountain View, Calif.); and CytoTox 96® non-radioactive cytotoxicity assay (Promega, Madison, Wis.)). Useful effector cells for such assays include peripheral blood mononuclear cells (PBMC) and Natural Killer (NK) cells. Alternatively, or additionally, ADCC activity of the molecule of interest may be assessed in vivo, e.g. in an animal model such as that disclosed in Clynes et al., Proc Natl Acad Sci USA 95, 652-656 (1998).

[0653] In some aspects, binding of the Fc domain to a complement component, specifically to Clq, is reduced. Accordingly, in some aspects wherein the Fc domain is engineered to have reduced effector function, said reduced effector function includes reduced CDC. Clq binding assays may be carried out to determine whether the bispecific antibodies of the invention are able to bind Clq and hence has CDC activity. See e.g., C1q and C3c binding ELISA in WO 2006/029879 and WO 2005/100402. To assess complement activation, a CDC assay may be performed (see, for example, Gazzano-Santoro et al., J Immunol Methods 202, 163 (1996); Cragg et al., Blood 101, 1045-1052 (2003); and Cragg and Glennie, Blood 103, 2738-2743 (2004)).

[0654] In one particular aspect, the Fc domain exhibiting reduced binding affinity to an Fc receptor and/or reduced effector function, as compared to a native IgG1 Fc domain, is a human IgG1 Fc domain comprising the amino acid substitutions L234A, L235A and optionally P329G, or a human IgG4 Fc domain comprising the amino acid substitutions S228P, L235E and optionally P329G (numberings according to Kabat EU index). More particularly, it is a human IgG1 Fc domain comprising the amino acid substitutions L234A, L235A and P329G (numbering according to Kabat EU index).

[0655] Fc Domain Modifications Promoting Heterodimerization

[0656] The bispecific agonistic CD28 antigen binding molecules of the invention comprise different antigen-binding sites, fused to one or the other of the two subunits of the Fc domain, thus the two subunits of the Fc domain may be comprised in two non-identical polypeptide chains. Recombinant co-expression of these polypeptides and subsequent dimerization leads to several possible combinations of the two polypeptides. To improve the yield and purity of the bispecific antigen binding molecules of the invention in recombinant production, it will thus be advantageous to introduce in the Fc domain of the bispecific antigen binding molecules of the invention a modification promoting the association of the desired polypeptides.

[0657] Accordingly, in particular aspects the invention relates to the bispecific agonistic CD28 antigen binding molecule with monovalent binding to CD28 comprising (a) one antigen binding domain capable of specific binding to CD28, (b) at least one antigen binding domain capable of specific binding to a tumor-associated antigen, and (c) a Fc domain composed of a first and a second subunit capable of stable association comprising one or more amino acid substitution that reduces the binding affinity of the antigen binding molecule to an Fc receptor and/or effector function, wherein the Fc domain comprises a modification promoting the association of the first and second subunit of the Fc domain. The site of most extensive protein-protein interaction between the two subunits of a human IgG Fc domain is in the CH3 domain of the Fc domain. Thus, in one aspect said modification is in the CH3 domain of the Fc domain.

[0658] In a specific aspect said modification is a so-called “knob-into-hole” modification, comprising a “knob” modification in one of the two subunits of the Fc domain and a “hole” modification in the other one of the two subunits of the Fc domain. Thus, the invention relates to the bispecific agonistic CD28 antigen binding molecule with monovalent binding to CD28 comprising (a) one antigen binding domain capable of specific binding to CD28, (b) at least one antigen binding domain capable of specific binding to a tumor-associated antigen, and (c) a Fc domain composed of a first and a second subunit capable of stable association comprising one or more amino acid substitution that reduces the binding affinity of the antigen binding molecule to an Fc receptor and/or effector function, wherein the first subunit of the Fc domain comprises knobs and the second subunit of the Fc domain comprises holes according to the knobs into holes method. In a particular aspect, the first subunit of the Fc domain comprises the amino acid substitutions S354C and T366W (EU numbering) and the second subunit of the Fc domain comprises the amino acid substitutions Y349C, T366S and Y407V (numbering according to Kabat EU index).

[0659] The knob-into-hole technology is described e.g. in U.S. Pat. Nos. 5,731,168; 7,695,936; Ridgway et al., Prot Eng 9, 617-621 (1996) and Carter, J Immunol Meth 248, 7-15 (2001). Generally, the method involves introducing a protuberance (“knob”) at the interface of a first polypeptide and a corresponding cavity (“hole”) in the interface of a second polypeptide, such that the protuberance can be positioned in the cavity so as to promote heterodimer formation and hinder homodimer formation. Protuberances are constructed by replacing small amino acid side chains from the interface of the first polypeptide with larger side chains (e.g. tyrosine or tryptophan). Compensatory cavities of identical or similar size to the protuberances are created in the interface of the second polypeptide by replacing large amino acid side chains with smaller ones (e.g. alanine or threonine).

[0660] Accordingly, in one aspect, in the CH3 domain of the first subunit of the Fc domain of the bispecific antigen binding molecules of the invention an amino acid residue is replaced with an amino acid residue having a larger side chain volume, thereby generating a protuberance within the CH3 domain of the first subunit which is positionable in a cavity within the CH3 domain of the second subunit, and in the CH3 domain of the second subunit of the Fc domain an amino acid residue is replaced with an amino acid residue having a smaller side chain volume, thereby generating a cavity within the CH3 domain of the second subunit within which the protuberance within the CH3 domain of the first subunit is positionable. The protuberance and cavity can be made by altering the nucleic acid encoding the polypeptides, e.g. by site-specific mutagenesis, or by peptide synthesis. In a specific aspect, in the CH3 domain of the first subunit of the Fc domain the threonine residue at position 366 is replaced with a tryptophan residue (T366W), and in the CH3 domain of the second subunit of the Fc domain the tyrosine residue at position 407 is replaced with a valine residue (Y407V). In one aspect, in the second subunit of the Fc domain additionally the threonine residue at position 366 is replaced with a serine residue (T366S) and the leucine residue at position 368 is replaced with an alanine residue (L368A).

[0661] In yet a further aspect, in the first subunit of the Fc domain additionally the serine residue at position 354 is replaced with a cysteine residue (S354C), and in the second subunit of the Fc domain additionally the tyrosine residue at position 349 is replaced by a cysteine residue (Y349C). Introduction of these two cysteine residues results in formation of a disulfide bridge between the two subunits of the Fc domain, further stabilizing the dimer (Carter (2001), J Immunol Methods 248, 7-15). In a particular aspect, the first subunit of the Fc domain comprises the amino acid substitutions S354C and T366W (EU numbering) and the second subunit of the Fc domain comprises the amino acid substitutions Y349C, T366S and Y407V (numbering according to Kabat EU index).

[0662] In an alternative aspect, a modification promoting association of the first and the second subunit of the Fc domain comprises a modification mediating electrostatic steering effects, e.g. as described in PCT publication WO 2009/089004. Generally, this method involves replacement of one or more amino acid residues at the interface of the two Fc domain subunits by charged amino acid residues so that homodimer formation becomes electrostatically unfavorable but heterodimerization electrostatically favorable.

[0663] The C-terminus of the heavy chain of the bispecific agonistic CD28 antigen binding molecule as reported herein can be a complete C-terminus ending with the amino acid residues PGK. The C-terminus of the heavy chain can be a shortened C-terminus in which one or two of the C terminal amino acid residues have been removed. In one preferred aspect, the C-terminus of the heavy chain is a shortened C-terminus ending P. In one preferred aspect, the C-terminus of the heavy chain is a shortened C-terminus ending PG. In one aspect of all aspects as reported herein, a CD28 antigen binding molecule comprising a heavy chain including a C-terminal CH3 domain as specified herein, comprises the C-terminal glycine-lysine dipeptide (G446 and K447, numbering according to Kabat EU index). In one aspect of all aspects as reported herein, a CD28 antigen binding molecule comprising a heavy chain including a C-terminal CH3 domain, as specified herein, comprises a C-terminal glycine residue (G446, numbering according to Kabat EU index).

[0664] Modifications in the Fab Domains

[0665] In one aspect, the invention relates to a bispecific agonistic CD28 antigen binding molecule characterized by monovalent binding to CD28 comprising (a) one antigen binding domain capable of specific binding to CD28, (b) at least one antigen binding domain capable of specific binding to a tumor-associated antigen, and (c) a Fc domain composed of a first and a second subunit capable of stable association comprising one or more amino acid substitution that reduces the binding affinity of the antigen binding molecule to an Fc receptor and/or effector function, wherein the at least one antigen binding domain capable of specific binding to a tumor-associated antigen is a Fab fragment and in the Fab fragment either the variable domains VH and VL or the constant domains CH1 and CL are exchanged according to the Crossmab technology.

[0666] Multispecific antibodies with a domain replacement/exchange in one binding arm (CrossMabVH-VL or CrossMabCH-CL) are described in detail in WO2009/080252 and Schaefer, W. et al, PNAS, 108 (2011) 11187-1191. They clearly reduce the byproducts caused by the mismatch of a light chain against a first antigen with the wrong heavy chain against the second antigen (compared to approaches without such domain exchange).

[0667] In one aspect, the invention relates to a bispecific agonistic CD28 antigen binding molecule characterized by monovalent binding to CD28 comprising (a) one antigen binding domain capable of specific binding to CD28, (b) at least one antigen binding domain capable of specific binding to a tumor-associated antigen, and (c) a Fc domain composed of a first and a second subunit capable of stable association comprising one or more amino acid substitution that reduces the binding affinity of the antigen binding molecule to an Fc receptor and/or effector function, wherein in the Fab fragments capable of specific binding to a tumor-associated antigen the constant domains CL and CH1 are replaced by each other so that the CH1 domain is part of the light chain and the CL domain is part of the heavy chain.

[0668] In another aspect, and to further improve correct pairing, the bispecific agonistic CD28 antigen binding molecule characterized by monovalent binding to CD28 comprising (a) one antigen binding domain capable of specific binding to CD28, (b) at least one antigen binding domains capable of specific binding to a tumor-associated antigen, and (c) a Fc domain composed of a first and a second subunit capable of stable association comprising one or more amino acid substitution that reduces the binding affinity of the antigen binding molecule to an Fc receptor and/or effector function, can contain different charged amino acid substitutions (so-called “charged residues”). These modifications are introduced in the crossed or non-crossed CH1 and CL domains. In a particular aspect, the invention relates to a bispecific agonistic CD28 antigen binding molecule, wherein in one of CL domains the amino acid at position 123 (EU numbering) has been replaced by arginine (R) and the amino acid at position 124 (EU numbering) has been substituted by lysine (K) and wherein in one of the CH1 domains the amino acids at position 147 (EU numbering) and at position 213 (EU numbering) have been substituted by glutamic acid (E). In one particular aspect, in the CL domain of the Fab fragment capable of specific binding to CD28 the amino acid at position 123 (EU numbering) has been replaced by arginine (R) and the amino acid at position 124 (EU numbering) has been substituted by lysine (K) and in the CH1 domain of the Fab fragment capable of specific binding to CD28 the amino acids at position 147 (EU numbering) and at position 213 (EU numbering) have been substituted by glutamic acid (E).

[0669] Polynucleotides

[0670] The invention further provides isolated polynucleotides encoding a bispecific agonistic CD28 antigen binding molecule as described herein or a fragment thereof. The one or more isolated polynucleotides encoding the bispecific agonistic CD28 antigen binding molecule of the invention may be expressed as a single polynucleotide that encodes the entire antigen binding molecule or as multiple (e.g., two or more) polynucleotides that are co-expressed. Polypeptides encoded by polynucleotides that are co-expressed may associate through, e.g., disulfide bonds or other means to form a functional antigen binding molecule. For example, the light chain portion of an immunoglobulin may be encoded by a separate polynucleotide from the heavy chain portion of the immunoglobulin. When co-expressed, the heavy chain polypeptides will associate with the light chain polypeptides to form the immunoglobulin. In some aspects, the isolated polynucleotide encodes the entire bispecific agonistic CD28 antigen binding molecule according to the invention as described herein. In other aspects, the isolated polynucleotide encodes a polypeptide comprised in the bispecific agonistic CD28 antigen binding molecule according to the invention as described herein. In certain aspects the polynucleotide or nucleic acid is DNA. In other aspects, a polynucleotide of the present invention is RNA, for example, in the form of messenger RNA (mRNA). RNA of the present invention may be single stranded or double stranded.

[0671] Recombinant Methods

[0672] Bispecific agonistic CD28 antigen binding molecules of the invention may be obtained, for example, by solid-state peptide synthesis (e.g. Merrifield solid phase synthesis) or recombinant production. For recombinant production one or more polynucleotide encoding the bispecific agonistic CD28 antigen binding molecule or polypeptide fragments thereof, e.g., as described above, is isolated and inserted into one or more vectors for further cloning and/or expression in a host cell. Such polynucleotide may be readily isolated and sequenced using conventional procedures. In one aspect of the invention, a vector, preferably an expression vector, comprising one or more of the polynucleotides of the invention is provided. Methods which are well known to those skilled in the art can be used to construct expression vectors containing the coding sequence of the antibody (fragment) along with appropriate transcriptional/translational control signals. These methods include in vitro recombinant DNA techniques, synthetic techniques and in vivo recombination/genetic recombination. See, for example, the techniques described in Maniatis et al., MOLECULAR CLONING: A LABORATORY MANUAL, Cold Spring Harbor Laboratory, N.Y. (1989); and Ausubel et al., CURRENT PROTOCOLS IN MOLECULAR BIOLOGY, Greene Publishing Associates and Wiley Interscience, N.Y. (1989). The expression vector can be part of a plasmid, virus, or may be a nucleic acid fragment. The expression vector includes an expression cassette into which the polynucleotide encoding the antibody or polypeptide fragments thereof (i.e. the coding region) is cloned in operable association with a promoter and/or other transcription or translation control elements. As used herein, a “coding region” is a portion of nucleic acid which consists of codons translated into amino acids. Although a “stop codon” (TAG, TGA, or TAA) is not translated into an amino acid, it may be considered to be part of a coding region, if present, but any flanking sequences, for example promoters, ribosome binding sites, transcriptional terminators, introns, 5′ and 3′ untranslated regions, and the like, are not part of a coding region. Two or more coding regions can be present in a single polynucleotide construct, e.g. on a single vector, or in separate polynucleotide constructs, e.g. on separate (different) vectors. Furthermore, any vector may contain a single coding region, or may comprise two or more coding regions, e.g. a vector of the present invention may encode one or more polypeptides, which are post- or co-translationally separated into the final proteins via proteolytic cleavage. In addition, a vector, polynucleotide, or nucleic acid of the invention may encode heterologous coding regions, either fused or unfused to a polynucleotide encoding the antibody of the invention or polypeptide fragments thereof, or variants or derivatives thereof. Heterologous coding regions include without limitation specialized elements or motifs, such as a secretory signal peptide or a heterologous functional domain. An operable association is when a coding region for a gene product, e.g. a polypeptide, is associated with one or more regulatory sequences in such a way as to place expression of the gene product under the influence or control of the regulatory sequence(s). Two DNA fragments (such as a polypeptide coding region and a promoter associated therewith) are “operably associated” if induction of promoter function results in the transcription of mRNA encoding the desired gene product and if the nature of the linkage between the two DNA fragments does not interfere with the ability of the expression regulatory sequences to direct the expression of the gene product or interfere with the ability of the DNA template to be transcribed. Thus, a promoter region would be operably associated with a nucleic acid encoding a polypeptide if the promoter was capable of effecting transcription of that nucleic acid. The promoter may be a cell-specific promoter that directs substantial transcription of the DNA only in predetermined cells. Other transcription control elements, besides a promoter, for example enhancers, operators, repressors, and transcription termination signals, can be operably associated with the polynucleotide to direct cell-specific transcription.

[0673] Suitable promoters and other transcription control regions are disclosed herein. A variety of transcription control regions are known to those skilled in the art. These include, without limitation, transcription control regions, which function in vertebrate cells, such as, but not limited to, promoter and enhancer segments from cytomegaloviruses (e.g. the immediate early promoter, in conjunction with intron-A), simian virus 40 (e.g. the early promoter), and retroviruses (such as, e.g. Rous sarcoma virus). Other transcription control regions include those derived from vertebrate genes such as actin, heat shock protein, bovine growth hormone and rabbit a-globin, as well as other sequences capable of controlling gene expression in eukaryotic cells. Additional suitable transcription control regions include tissue-specific promoters and enhancers as well as inducible promoters (e.g. promoters inducible tetracyclins). Similarly, a variety of translation control elements are known to those of ordinary skill in the art. These include, but are not limited to ribosome binding sites, translation initiation and termination codons, and elements derived from viral systems (particularly an internal ribosome entry site, or IRES, also referred to as a CITE sequence). The expression cassette may also include other features such as an origin of replication, and/or chromosome integration elements such as retroviral long terminal repeats (LTRs), or adeno-associated viral (AAV) inverted terminal repeats (ITRs).

[0674] Polynucleotide and nucleic acid coding regions of the present invention may be associated with additional coding regions which encode secretory or signal peptides, which direct the secretion of a polypeptide encoded by a polynucleotide of the present invention. For example, if secretion of the antibody or polypeptide fragments thereof is desired, DNA encoding a signal sequence may be placed upstream of the nucleic acid an antibody of the invention or polypeptide fragments thereof. According to the signal hypothesis, proteins secreted by mammalian cells have a signal peptide or secretory leader sequence which is cleaved from the mature protein once export of the growing protein chain across the rough endoplasmic reticulum has been initiated. Those of ordinary skill in the art are aware that polypeptides secreted by vertebrate cells generally have a signal peptide fused to the N-terminus of the polypeptide, which is cleaved from the translated polypeptide to produce a secreted or “mature” form of the polypeptide. In certain embodiments, the native signal peptide, e.g. an immunoglobulin heavy chain or light chain signal peptide is used, or a functional derivative of that sequence that retains the ability to direct the secretion of the polypeptide that is operably associated with it. Alternatively, a heterologous mammalian signal peptide, or a functional derivative thereof, may be used. For example, the wild-type leader sequence may be substituted with the leader sequence of human tissue plasminogen activator (TPA) or mouse β-glucuronidase.

[0675] DNA encoding a short protein sequence that could be used to facilitate later purification (e.g. a histidine tag) or assist in labeling the bispecific agonistic CD28 antigen binding molecule may be included within or at the ends of the polynucleotide encoding an antibody of the invention or polypeptide fragments thereof.

[0676] In a further aspect of the invention, a host cell comprising one or more polynucleotides of the invention is provided. In certain embodiments a host cell comprising one or more vectors of the invention is provided. The polynucleotides and vectors may incorporate any of the features, singly or in combination, described herein in relation to polynucleotides and vectors, respectively. In one aspect, a host cell comprises (e.g. has been transformed or transfected with) a vector comprising a polynucleotide that encodes (part of) an antibody of the invention of the invention. As used herein, the term “host cell” refers to any kind of cellular system which can be engineered to generate the fusion proteins of the invention or fragments thereof. Host cells suitable for replicating and for supporting expression of antigen binding molecules are well known in the art. Such cells may be transfected or transduced as appropriate with the particular expression vector and large quantities of vector containing cells can be grown for seeding large scale fermenters to obtain sufficient quantities of the antigen binding molecule for clinical applications. Suitable host cells include prokaryotic microorganisms, such as E. coli, or various eukaryotic cells, such as Chinese hamster ovary cells (CHO), insect cells, or the like. For example, polypeptides may be produced in bacteria in particular when glycosylation is not needed. After expression, the polypeptide may be isolated from the bacterial cell paste in a soluble fraction and can be further purified. In addition to prokaryotes, eukaryotic microbes such as filamentous fungi or yeast are suitable cloning or expression hosts for polypeptide-encoding vectors, including fungi and yeast strains whose glycosylation pathways have been “humanized”, resulting in the production of a polypeptide with a partially or fully human glycosylation pattern. See Gerngross, Nat Biotech 22, 1409-1414 (2004), and Li et al., Nat Biotech 24, 210-215 (2006).

[0677] Suitable host cells for the expression of (glycosylated) polypeptides are also derived from multicellular organisms (invertebrates and vertebrates). Examples of invertebrate cells include plant and insect cells. Numerous baculoviral strains have been identified which may be used in conjunction with insect cells, particularly for transfection of Spodoptera frugiperda cells. Plant cell cultures can also be utilized as hosts. See e.g. U.S. Pat. Nos. 5,959,177, 6,040,498, 6,420,548, 7,125,978, and 6,417,429 (describing PLANTIBODIES™ technology for producing antibodies in transgenic plants). Vertebrate cells may also be used as hosts. For example, mammalian cell lines that are adapted to grow in suspension may be useful. Other examples of useful mammalian host cell lines are monkey kidney CV1 line transformed by SV40 (COS-7); human embryonic kidney line (293 or 293T cells as described, e.g., in Graham et al., J Gen Virol 36, 59 (1977)), baby hamster kidney cells (BHK), mouse sertoli cells (TM4 cells as described, e.g., in Mather, Biol Reprod 23, 243-251 (1980)), monkey kidney cells (CV1), African green monkey kidney cells (VERO-76), human cervical carcinoma cells (HELA), canine kidney cells (MDCK), buffalo rat liver cells (BRL 3A), human lung cells (W138), human liver cells (Hep G2), mouse mammary tumor cells (MMT 060562), TRI cells (as described, e.g., in Mather et al., Annals N.Y. Acad Sci 383, 44-68 (1982)), MRC 5 cells, and FS4 cells. Other useful mammalian host cell lines include Chinese hamster ovary (CHO) cells, including dhfr-CHO cells (Urlaub et al., Proc Natl Acad Sci USA 77, 4216 (1980)); and myeloma cell lines such as YO, NS0, P3X63 and Sp2/0. For a review of certain mammalian host cell lines suitable for protein production, see, e.g., Yazaki and Wu, Methods in Molecular Biology, Vol. 248 (B. K. C. Lo, ed., Humana Press, Totowa, N.J.), pp. 255-268 (2003). Host cells include cultured cells, e.g., mammalian cultured cells, yeast cells, insect cells, bacterial cells and plant cells, to name only a few, but also cells comprised within a transgenic animal, transgenic plant or cultured plant or animal tissue. In one embodiment, the host cell is a eukaryotic cell, preferably a mammalian cell, such as a Chinese Hamster Ovary (CHO) cell, a human embryonic kidney (HEK) cell or a lymphoid cell (e.g., Y0, NS0, Sp20 cell). Standard technologies are known in the art to express foreign genes in these systems. Cells expressing a polypeptide comprising either the heavy or the light chain of an immunoglobulin, may be engineered so as to also express the other of the immunoglobulin chains such that the expressed product is an immunoglobulin that has both a heavy and a light chain.

[0678] In one aspect, a method of producing a bispecific agonistic CD28 antigen binding molecule of the invention or polypeptide fragments thereof is provided, wherein the method comprises culturing a host cell comprising polynucleotides encoding the antibody of the invention or polypeptide fragments thereof, as provided herein, under conditions suitable for expression of the antibody of the invention or polypeptide fragments thereof, and recovering the antibody of the invention or polypeptide fragments thereof from the host cell (or host cell culture medium).

[0679] In certain aspects the moieties capable of specific binding to a target cell antigen (e.g. Fab fragments) forming part of the antigen binding molecule comprise at least an immunoglobulin variable region capable of binding to an antigen. Variable regions can form part of and be derived from naturally or non-naturally occurring antibodies and fragments thereof. Methods to produce polyclonal antibodies and monoclonal antibodies are well known in the art (see e.g. Harlow and Lane, “Antibodies, a laboratory manual”, Cold Spring Harbor Laboratory, 1988). Non-naturally occurring antibodies can be constructed using solid phase-peptide synthesis, can be produced recombinantly (e.g. as described in U.S. Pat. No. 4,186,567) or can be obtained, for example, by screening combinatorial libraries comprising variable heavy chains and variable light chains (see e.g. U.S. Pat. No. 5,969,108 to McCafferty).

[0680] Any animal species of immunoglobulin can be used in the invention. Non-limiting immunoglobulins useful in the present invention can be of murine, primate, or human origin. If the fusion protein is intended for human use, a chimeric form of immunoglobulin may be used wherein the constant regions of the immunoglobulin are from a human. A humanized or fully human form of the immunoglobulin can also be prepared in accordance with methods well known in the art (see e.g. U.S. Pat. No. 5,565,332 to Winter). Humanization may be achieved by various methods including, but not limited to (a) grafting the non-human (e.g., donor antibody) CDRs onto human (e.g. recipient antibody) framework and constant regions with or without retention of critical framework residues (e.g. those that are important for retaining good antigen binding affinity or antibody functions), (b) grafting only the non-human specificity-determining regions (SDRs or a-CDRs; the residues critical for the antibody-antigen interaction) onto human framework and constant regions, or (c) transplanting the entire non-human variable domains, but “cloaking” them with a human-like section by replacement of surface residues. Humanized antibodies and methods of making them are reviewed, e.g., in Almagro and Fransson, Front Biosci 13, 1619-1633 (2008), and are further described, e.g., in Riechmann et al., Nature 332, 323-329 (1988); Queen et al., Proc Natl Acad Sci USA 86, 10029-10033 (1989); U.S. Pat. Nos. 5,821,337, 7,527,791, 6,982,321, and 7,087,409; Jones et al., Nature 321, 522-525 (1986); Morrison et al., Proc Natl Acad Sci 81, 6851-6855 (1984); Morrison and Oi, Adv Immunol 44, 65-92 (1988); Verhoeyen et al., Science 239, 1534-1536 (1988); Padlan, Molec Immun 31(3), 169-217 (1994); Kashmiri et al., Methods 36, 25-34 (2005) (describing SDR (a-CDR) grafting); Padlan, Mol Immunol 28, 489-498 (1991) (describing “resurfacing”); Dall'Acqua et al., Methods 36, 43-60 (2005) (describing “FR shuffling”); and Osbourn et al., Methods 36, 61-68 (2005) and Klimka et al., Br J Cancer 83, 252-260 (2000) (describing the “guided selection” approach to FR shuffling). Particular immunoglobulins according to the invention are human immunoglobulins. Human antibodies and human variable regions can be produced using various techniques known in the art. Human antibodies are described generally in van Dijk and van de Winkel, Curr Opin Pharmacol 5, 368-74 (2001) and Lonberg, Curr Opin Immunol 20, 450-459 (2008). Human variable regions can form part of and be derived from human monoclonal antibodies made by the hybridoma method (see e.g. Monoclonal Antibody Production Techniques and Applications, pp. 51-63 (Marcel Dekker, Inc., New York, 1987)). Human antibodies and human variable regions may also be prepared by administering an immunogen to a transgenic animal that has been modified to produce intact human antibodies or intact antibodies with human variable regions in response to antigenic challenge (see e.g. Lonberg, Nat Biotech 23, 1117-1125 (2005). Human antibodies and human variable regions may also be generated by isolating Fv clone variable region sequences selected from human-derived phage display libraries (see e.g., Hoogenboom et al. in Methods in Molecular Biology 178, 1-37 (O'Brien et al., ed., Human Press, Totowa, N.J., 2001); and McCafferty et al., Nature 348, 552-554; Clackson et al., Nature 352, 624-628 (1991)). Phage typically display antibody fragments, either as single-chain Fv (scFv) fragments or as Fab fragments.

[0681] In certain aspects, the bispecific agonistic CD28 antigen binding molecules are engineered to have enhanced binding affinity according to, for example, the methods disclosed in PCT publication WO 2012/020006 (see Examples relating to affinity maturation) or U.S. Pat. Appl. Publ. No. 2004/0132066. The ability of the antigen binding molecules of the invention to bind to a specific antigenic determinant can be measured either through an enzyme-linked immunosorbent assay (ELISA) or other techniques familiar to one of skill in the art, e.g. surface plasmon resonance technique (Liljeblad, et al., Glyco J 17, 323-329 (2000)), and traditional binding assays (Heeley, Endocr Res 28, 217-229 (2002)). Competition assays may be used to identify an antigen binding molecule that competes with a reference antibody for binding to a particular antigen. In certain embodiments, such a competing antigen binding molecule binds to the same epitope (e.g. a linear or a conformational epitope) that is bound by the reference antigen binding molecule. Detailed exemplary methods for mapping an epitope to which an antigen binding molecule binds are provided in Morris (1996) “Epitope Mapping Protocols”, in Methods in Molecular Biology vol. 66 (Humana Press, Totowa, N.J.). In an exemplary competition assay, immobilized antigen is incubated in a solution comprising a first labeled antigen binding molecule that binds to the antigen and a second unlabeled antigen binding molecule that is being tested for its ability to compete with the first antigen binding molecule for binding to the antigen. The second antigen binding molecule may be present in a hybridoma supernatant. As a control, immobilized antigen is incubated in a solution comprising the first labeled antigen binding molecule but not the second unlabeled antigen binding molecule. After incubation under conditions permissive for binding of the first antibody to the antigen, excess unbound antibody is removed, and the amount of label associated with immobilized antigen is measured. If the amount of label associated with immobilized antigen is substantially reduced in the test sample relative to the control sample, then that indicates that the second antigen binding molecule is competing with the first antigen binding molecule for binding to the antigen. See Harlow and Lane (1988) Antibodies: A Laboratory Manual ch. 14 (Cold Spring Harbor Laboratory, Cold Spring Harbor, N.Y.).

[0682] Bispecific agonistic CD28 antigen binding molecules of the invention prepared as described herein may be purified by art-known techniques such as high performance liquid chromatography, ion exchange chromatography, gel electrophoresis, affinity chromatography, size exclusion chromatography, and the like. The actual conditions used to purify a particular protein will depend, in part, on factors such as net charge, hydrophobicity, hydrophilicity etc., and will be apparent to those having skill in the art. For affinity chromatography purification an antibody, ligand, receptor or antigen can be used to which the antigen binding molecule binds. For example, for affinity chromatography purification of antigen binding molecules of the invention, a matrix with protein A or protein G may be used. Sequential Protein A or G affinity chromatography and size exclusion chromatography can be used to isolate an antigen binding molecule essentially as described in the Examples. The purity of the CD28 antigen binding molecule or fragments thereof can be determined by any of a variety of well-known analytical methods including gel electrophoresis, high pressure liquid chromatography, and the like. For example, the CD28 antigen binding molecule expressed as described in the Examples were shown to be intact and properly assembled as demonstrated by reducing and non-reducing SDS-PAGE.

[0683] Assays

[0684] The bispecific agonistic CD28 antigen binding molecules provided herein may be identified, screened for, or characterized for their physical/chemical properties and/or biological activities by various assays known in the art.

[0685] 1. Affinity Assays

[0686] The affinity of the antigen binding molecule provided herein for the corresponding target can be determined in accordance with the methods set forth in the Examples by surface plasmon resonance (SPR), using standard instrumentation such as a Proteon instrument (Bio-rad), and receptors or target proteins such as may be obtained by recombinant expression. The affinity of the TNF family ligand trimer-containing antigen binding molecule for the target cell antigen can also be determined by surface plasmon resonance (SPR), using standard instrumentation such as a Proteon instrument (Bio-rad), and receptors or target proteins such as may be obtained by recombinant expression. A specific illustrative and exemplary embodiment for measuring binding affinity is described in Example 4. According to one aspect, K_{D} is measured by surface plasmon resonance using a Proteon® machine (Bio-Rad) at 25° C.

[0687] 2. Binding Assays and Other Assays

[0688] Binding of the bispecific antigen binding molecule provided herein to the corresponding receptor expressing cells may be evaluated using cell lines expressing the particular receptor or target antigen, for example by flow cytometry (FACS). In one aspect, CHO cells expressing human CD28 (parental cell line CHO-k1 ATCC # CCL-61, modified to stably overexpress human CD28) are used in the binding assay.

[0689] In a further aspect, cancer cell lines expressing the target cell antigen, for example FAP or CEA, CD19 or CD79b, were used to demonstrate the binding of the bispecific antigen binding molecules to the target cell antigen.

[0690] 3. Activity Assays

[0691] In one aspect, assays are provided for identifying CD28 antigen binding molecules having biological activity. Biological activity may include, e.g. T cell proliferation and cytokine secretion as measured with the method as described in Example 6 or tumor cell killing as measured in Example 7. Antibodies having such biological activity in vivo and/or in vitro are also provided.

[0692] Pharmaceutical Compositions, Formulations and Routes of Administation

[0693] In a further aspect, the invention provides pharmaceutical compositions comprising any of the bispecific agonistic CD28 antigen binding molecules provided herein, e.g., for use in any of the below therapeutic methods. In one embodiment, a pharmaceutical composition comprises a bispecific agonistic CD28 antigen binding molecule provided herein and at least one pharmaceutically acceptable excipient. In another aspect, a pharmaceutical composition comprises a bispecific agonistic CD28 antigen binding molecule provided herein and at least one additional therapeutic agent, e.g., as described below.

[0694] Pharmaceutical compositions of the present invention comprise a therapeutically effective amount of one or more bispecific antigen binding molecules dissolved or dispersed in a pharmaceutically acceptable excipient. The phrases “pharmaceutical or pharmacologically acceptable” refers to molecular entities and compositions that are generally non-toxic to recipients at the dosages and concentrations employed, i.e. do not produce an adverse, allergic or other untoward reaction when administered to an animal, such as, for example, a human, as appropriate. The preparation of a pharmaceutical composition that contains at least one bispecific agonistic CD28 antigen binding molecule and optionally an additional active ingredient will be known to those of skill in the art in light of the present disclosure, as exemplified by Remington's Pharmaceutical Sciences, 18th Ed. Mack Printing Company, 1990, incorporated herein by reference. In particular, the compositions are lyophilized formulations or aqueous solutions. As used herein, “pharmaceutically acceptable excipient” includes any and all solvents, buffers, dispersion media, coatings, surfactants, antioxidants, preservatives (e.g. antibacterial agents, antifungal agents), isotonic agents, salts, stabilizers and combinations thereof, as would be known to one of ordinary skill in the art.

[0695] Parenteral compositions include those designed for administration by injection, e.g. subcutaneous, intradermal, intralesional, intravenous, intraarterial intramuscular, intrathecal or intraperitoneal injection. For injection, the TNF family ligand trimer-containing antigen binding molecules of the invention may be formulated in aqueous solutions, preferably in physiologically compatible buffers such as Hanks' solution, Ringer's solution, or physiological saline buffer. The solution may contain formulatory agents such as suspending, stabilizing and/or dispersing agents. Alternatively, the bispecific agonistic CD28 antigen binding molecule may be in powder form for constitution with a suitable vehicle, e.g., sterile pyrogen-free water, before use. Sterile injectable solutions are prepared by incorporating the fusion proteins of the invention in the required amount in the appropriate solvent with various of the other ingredients enumerated below, as required. Sterility may be readily accomplished, e.g., by filtration through sterile filtration membranes. Generally, dispersions are prepared by incorporating the various sterilized active ingredients into a sterile vehicle which contains the basic dispersion medium and/or the other ingredients. In the case of sterile powders for the preparation of sterile injectable solutions, suspensions or emulsion, the preferred methods of preparation are vacuum-drying or freeze-drying techniques which yield a powder of the active ingredient plus any additional desired ingredient from a previously sterile-filtered liquid medium thereof. The liquid medium should be suitably buffered if necessary and the liquid diluent first rendered isotonic prior to injection with sufficient saline or glucose. The composition must be stable under the conditions of manufacture and storage, and preserved against the contaminating action of microorganisms, such as bacteria and fungi. It will be appreciated that endotoxin contamination should be kept minimally at a safe level, for example, less that 0.5 ng/mg protein. Suitable pharmaceutically acceptable excipients include, but are not limited to: buffers such as phosphate, citrate, and other organic acids; antioxidants including ascorbic acid and methionine; preservatives (such as octadecyldimethylbenzyl ammonium chloride; hexamethonium chloride; benzalkonium chloride; benzethonium chloride; phenol, butyl or benzyl alcohol; alkyl parabens such as methyl or propyl paraben; catechol; resorcinol; cyclohexanol; 3-pentanol; and m-cresol); low molecular weight (less than about 10 residues) polypeptides; proteins, such as serum albumin, gelatin, or immunoglobulins; hydrophilic polymers such as polyvinylpyrrolidone; amino acids such as glycine, glutamine, asparagine, histidine, arginine, or lysine; monosaccharides, disaccharides, and other carbohydrates including glucose, mannose, or dextrins; chelating agents such as EDTA; sugars such as sucrose, mannitol, trehalose or sorbitol; salt-forming counter-ions such as sodium; metal complexes (e.g. Zn-protein complexes); and/or non-ionic surfactants such as polyethylene glycol (PEG). Aqueous injection suspensions may contain compounds which increase the viscosity of the suspension, such as sodium carboxymethyl cellulose, sorbitol, dextran, or the like. Optionally, the suspension may also contain suitable stabilizers or agents which increase the solubility of the compounds to allow for the preparation of highly concentrated solutions. Additionally, suspensions of the active compounds may be prepared as appropriate oily injection suspensions. Suitable lipophilic solvents or vehicles include fatty oils such as sesame oil, or synthetic fatty acid esters, such as ethyl cleats or triglycerides, or liposomes.

[0696] Active ingredients may be entrapped in microcapsules prepared, for example, by coacervation techniques or by interfacial polymerization, for example, hydroxymethylcellulose or gelatin-microcapsules and poly-(methylmethacylate) microcapsules, respectively, in colloidal drug delivery systems (for example, liposomes, albumin microspheres, microemulsions, nano-particles and nanocapsules) or in macroemulsions. Such techniques are disclosed in Remington's Pharmaceutical Sciences (18th Ed. Mack Printing Company, 1990). Sustained-release preparations may be prepared. Suitable examples of sustained-release preparations include semipermeable matrices of solid hydrophobic polymers containing the polypeptide, which matrices are in the form of shaped articles, e.g. films, or microcapsules. In particular embodiments, prolonged absorption of an injectable composition can be brought about by the use in the compositions of agents delaying absorption, such as, for example, aluminum monostearate, gelatin or combinations thereof. Exemplary pharmaceutically acceptable excipients herein further include insterstitial drug dispersion agents such as soluble neutral-active hyaluronidase glycoproteins (sHASEGP), for example, human soluble PH-20 hyaluronidase glycoproteins, such as rHuPH20 (HYLENEX®, Baxter International, Inc.). Certain exemplary sHASEGPs and methods of use, including rHuPH20, are described in US Patent Publication Nos. 2005/0260186 and 2006/0104968. In one aspect, a sHASEGP is combined with one or more additional glycosaminoglycanases such as chondroitinases. Exemplary lyophilized antibody formulations are described in U.S. Pat. No. 6,267,958. Aqueous antibody formulations include those described in U.S. Pat. No. 6,171,586 and WO2006/044908, the latter formulations including a histidine-acetate buffer. In addition to the compositions described previously, the bispecific agonistic CD28 antigen binding molecule may also be formulated as a depot preparation. Such long acting formulations may be administered by implantation (for example subcutaneously or intramuscularly) or by intramuscular injection. Thus, for example, the bispecific agonistic CD28 antigen binding molecule may be formulated with suitable polymeric or hydrophobic materials (for example as an emulsion in an acceptable oil) or ion exchange resins, or as sparingly soluble derivatives, for example, as a sparingly soluble salt.

[0697] Pharmaceutical compositions comprising the bispecific agonistic CD28 antigen binding molecule of the invention may be manufactured by means of conventional mixing, dissolving, emulsifying, encapsulating, entrapping or lyophilizing processes. Pharmaceutical compositions may be formulated in conventional manner using one or more physiologically acceptable carriers, diluents, excipients or auxiliaries which facilitate processing of the proteins into preparations that can be used pharmaceutically. Proper formulation is dependent upon the route of administration chosen. The bispecific agonistic CD28 antigen binding molecule of the invention may be formulated into a composition in a free acid or base, neutral or salt form. Pharmaceutically acceptable salts are salts that substantially retain the biological activity of the free acid or base.

[0698] These include the acid addition salts, e.g. those formed with the free amino groups of a proteinaceous composition, or which are formed with inorganic acids such as for example, hydrochloric or phosphoric acids, or such organic acids as acetic, oxalic, tartaric or mandelic acid. Salts formed with the free carboxyl groups can also be derived from inorganic bases such as for example, sodium, potassium, ammonium, calcium or ferric hydroxides; or such organic bases as isopropylamine, trimethylamine, histidine or procaine. Pharmaceutical salts tend to be more soluble in aqueous and other protic solvents than are the corresponding free base forms.

[0699] The composition herein may also contain more than one active ingredients as necessary for the particular indication being treated, preferably those with complementary activities that do not adversely affect each other. Such active ingredients are suitably present in combination in amounts that are effective for the purpose intended. The formulations to be used for in vivo administration are generally sterile. Sterility may be readily accomplished, e.g., by filtration through sterile filtration membranes.

[0700] Therapeutic Methods and Compositions

[0701] Any of the bispecific agonistic CD28 antigen binding molecules provided herein may be used in therapeutic methods, either alone or in combination.

[0702] In one aspect, a bispecific agonistic CD28 antigen binding molecule for use as a medicament is provided. In further aspects, a bispecific agonistic CD28 antigen binding molecule for use in treating cancer is provided. In certain aspects, a bispecific agonistic CD28 antigen binding molecule for use in a method of treatment is provided. In certain aspects, herein is provided a bispecific agonistic CD28 antigen binding molecule for use in a method of treating an individual having cancer comprising administering to the individual an effective amount of the bispecific agonistic CD28 antigen binding molecule. In one such embodiment, the method further comprises administering to the individual an effective amount of at least one additional therapeutic agent.

[0703] In one aspect, the bispecific agonistic CD28 antigen binding molecule for use in treating a B-cell proliferative disorder. In particular aspects, the bispecific agonistic CD28 antigen binding molecule is for use in treating a B-cell proliferative disorder selected from the group consisting of Non-Hodgkin lymphoma (NHL), acute lymphocytic leukemia (ALL), chronic lymphocytic leukemia (CLL), diffuse large B-cell lymphoma (DLBCL), follicular lymphoma (FL), mantle-cell lymphoma (MCL), marginal zone lymphoma (MZL), Multiple myeloma (MM) and Hodgkin lymphoma (HL). In one particular aspect, the B-cell cancer is non-Hodgkin lymphoma or acute lymphoblastic leukemia. In certain aspects, a bispecific agonistic CD28 antigen binding molecule for use in a method of treatment is provided. In certain aspects, herein is provided a bispecific agonistic CD28 antigen binding molecule for use in a method of treating an individual having cancer comprising administering to the individual an effective amount of the bispecific agonistic CD28 antigen binding molecule. In another aspect, provided is a bispecific agonistic CD28 antigen binding molecule for use in a method of treating an individual having B-cell proliferative disorder, in particular a B-cell proliferative disorder selected from the group consisting of Non-Hodgkin lymphoma (NHL), acute lymphocytic leukemia (ALL), chronic lymphocytic leukemia (CLL), diffuse large B-cell lymphoma (DLBCL), follicular lymphoma (FL), mantle-cell lymphoma (MCL), marginal zone lymphoma (MZL), Multiple myeloma (MM) and Hodgkin lymphoma (HL), comprising administering to the individual an effective amount of the bispecific agonistic CD28 antigen binding molecule. In one such embodiment, the method further comprises administering to the individual an effective amount of at least one additional therapeutic agent.

[0704] In further aspects, a bispecific agonistic CD28 antigen binding molecule as described herein for use in cancer immunotherapy is provided. In certain embodiments, a bispecific agonistic CD28 antigen binding molecule for use in a method of cancer immunotherapy is provided. An “individual” according to any of the above aspects is preferably a human.

[0705] In a further aspect, herein is provided for the use of a bispecific agonistic CD28 antigen binding molecule as described herein in the manufacture or preparation of a medicament. In one embodiment, the medicament is for treatment of cancer. In a further aspect, the medicament is for use in a method of treating cancer comprising administering to an individual having cancer an effective amount of the medicament. In one such aspect, the method further comprises administering to the individual an effective amount of at least one additional therapeutic agent, e.g., as described below. In another aspect, the medicament is for treatment of a B-cell proliferative disorder. In a further aspect, the medicament is for use in a method of treating cancer or a B-cell proliferative disorder comprising administering to an individual having cancer an effective amount of the medicament.

[0706] In a further aspect, herein is provided a method for treating a cancer. In one aspect, the method comprises administering to an individual having cancer an effective amount of a bispecific agonistic CD28 antigen binding molecule. In one such aspect, the method further comprises administering to the individual an effective amount of at least one additional therapeutic agent, as described below. An “individual” according to any of the above aspects may be a human.

[0707] In a further aspect, herein are provided pharmaceutical formulations comprising any of the bispecific agonistic CD28 antigen binding molecules as reported herein, e.g., for use in any of the above therapeutic methods. In one aspect, a pharmaceutical formulation comprises any of the bispecific agonistic CD28 antigen binding molecules as reported herein and a pharmaceutically acceptable carrier. In another aspect, a pharmaceutical formulation comprises any of the bispecific agonistic CD28 antigen binding molecules as reported herein and at least one additional therapeutic agent.

[0708] Bispecific agonistic CD28 antigen binding molecules as reported herein can be used either alone or in combination with other agents in a therapy. For instance, a bispecific agonistic CD28 antigen binding molecule as reported herein may be co-administered with at least one additional therapeutic agent.

[0709] Such combination therapies noted above encompass combined administration (where two or more therapeutic agents are included in the same or separate formulations), and separate administration, in which case, administration of the antibody as reported herein can occur prior to, simultaneously, and/or following, administration of the additional therapeutic agent or agents.

[0710] In one aspect, administration of the bispecific agonistic CD28 antigen binding molecule and administration of an additional therapeutic agent occur within about one month, or within about one, two or three weeks, or within about one, two, three, four, five, or six days, of each other.

[0711] An antigen binding molecule as reported herein (and any additional therapeutic agent) can be administered by any suitable means, including parenteral, intrapulmonary, and intranasal, and, if desired for local treatment, intralesional administration. Parenteral infusions include intramuscular, intravenous, intraarterial, intraperitoneal, or subcutaneous administration. Dosing can be by any suitable route, e.g. by injections, such as intravenous or subcutaneous injections, depending in part on whether the administration is brief or chronic. Various dosing schedules including but not limited to single or multiple administrations over various time-points, bolus administration, and pulse infusion are contemplated herein.

[0712] Bispecific agonistic CD28 antigen binding molecules as described herein would be formulated, dosed, and administered in a fashion consistent with good medical practice. Factors for consideration in this context include the particular disorder being treated, the particular mammal being treated, the clinical condition of the individual patient, the cause of the disorder, the site of delivery of the agent, the method of administration, the scheduling of administration, and other factors known to medical practitioners. The bispecific agonistic CD28 antigen binding molecule need not be, but is optionally formulated with one or more agents currently used to prevent or treat the disorder in question. The effective amount of such other agents depends on the amount of antibody present in the formulation, the type of disorder or treatment, and other factors discussed above. These are generally used in the same dosages and with administration routes as described herein, or about from 1 to 99% of the dosages described herein, or in any dosage and by any route that is empirically/clinically determined to be appropriate.

[0713] For the prevention or treatment of disease, the appropriate dosage of a bispecific agonistic CD28 antigen binding molecule as described herein (when used alone or in combination with one or more other additional therapeutic agents) will depend on the type of disease to be treated, the type of antibody, the severity and course of the disease, whether the antibody is administered for preventive or therapeutic purposes, previous therapy, the patient's clinical history and response to the antibody, and the discretion of the attending physician. The bispecific agonistic CD28 antigen binding molecule is suitably administered to the patient at one time or over a series of treatments. Depending on the type and severity of the disease, about 1 μg/kg to 15 mg/kg (e.g. 0.5 mg/kg-10 mg/kg) of bispecific agonistic CD28 antigen binding molecule can be an initial candidate dosage for administration to the patient, whether, for example, by one or more separate administrations, or by continuous infusion. One typical daily dosage might range from about 1 pg/kg to 100 mg/kg or more, depending on the factors mentioned above. For repeated administrations over several days or longer, depending on the condition, the treatment would generally be sustained until a desired suppression of disease symptoms occurs. One exemplary dosage of the antibody would be in the range from about 0.05 mg/kg to about 10 mg/kg. Thus, one or more doses of about 0.5 mg/kg, 2.0 mg/kg, 4.0 mg/kg or 10 mg/kg (or any combination thereof) may be administered to the patient. Such doses may be administered intermittently, e.g. every week or every three weeks (e.g. such that the patient receives from about two to about twenty, or e.g. about six doses of the antibody). An initial higher loading dose, followed by one or more lower doses may be administered. However, other dosage regimens may be useful. The progress of this therapy is easily monitored by conventional techniques and assays.

[0714] Other Agents and Treatments

[0715] The bispecific agonistic CD28 antigen binding molecules of the invention may be administered in combination with one or more other agents in therapy. For instance, an antigen binding molecule of the invention may be co-administered with at least one additional therapeutic agent. The term “therapeutic agent” encompasses any agent that can be administered for treating a symptom or disease in an individual in need of such treatment. Such additional therapeutic agent may comprise any active ingredients suitable for the particular indication being treated, preferably those with complementary activities that do not adversely affect each other. In certain embodiments, an additional therapeutic agent is another anti-cancer agent, for example a microtubule disruptor, an antimetabolite, a topoisomerase inhibitor, a DNA intercalator, an alkylating agent, a hormonal therapy, a kinase inhibitor, a receptor antagonist, an activator of tumor cell apoptosis, or an antiangiogenic agent. In certain aspects, an additional therapeutic agent is an immunomodulatory agent, a cytostatic agent, an inhibitor of cell adhesion, a cytotoxic or cytostatic agent, an activator of cell apoptosis, or an agent that increases the sensitivity of cells to apoptotic inducers.

[0716] Thus, provided are bispecific agonistic CD28 antigen binding molecules of the invention or pharmaceutical compositions comprising them for use in the treatment of cancer, wherein the bispecific antigen binding molecule is administered in combination with a chemotherapeutic agent, radiation and/or other agents for use in cancer immunotherapy.

[0717] Such other agents are suitably present in combination in amounts that are effective for the purpose intended. The effective amount of such other agents depends on the amount of fusion protein used, the type of disorder or treatment, and other factors discussed above. The bispecific antigen binding molecule or antibody of the invention are generally used in the same dosages and with administration routes as described herein, or about from 1 to 99% of the dosages described herein, or in any dosage and by any route that is empirically/clinically determined to be appropriate. Such combination therapies noted above encompass combined administration (where two or more therapeutic agents are included in the same or separate compositions), and separate administration, in which case, administration of the bispecific antigen binding molecule or antibody of the invention can occur prior to, simultaneously, and/or following, administration of the additional therapeutic agent and/or adjuvant.

[0718] In a further aspect, provided is the bispecific agonistic CD28 antigen binding molecule as described herein before for use in the treatment of cancer, wherein the bispecific antigen binding molecule is administered in combination with another immunomodulator. The term “immunomodulator” refers to any substance including a monoclonal antibody that effects the immune system. The molecules of the inventions can be considered immunomodulators. Immunomodulators can be used as anti-neoplastic agents for the treatment of cancer. In one aspect, immunomodulators include, but are not limited to anti-CTLA4 antibodies (e.g. ipilimumab), anti-PD1 antibodies (e.g. nivolumab or pembrolizumab), PD-L1 antibodies (e.g. atezolizumab, avelumab or durvalumab), OX-40 antibodies, 4-1BB antibodies and GITR antibodies. Such combination therapies noted above encompass combined administration (where two or more therapeutic agents are included in the same or separate compositions), and separate administration, in which case, administration of the bispecific antigen binding molecule can occur prior to, simultaneously, and/or following, administration of the additional therapeutic agent and/or adjuvant.

[0719] Combination with T Cell Bispecific Antibodies

[0720] In one aspect, the bispecific agonistic CD28 antigen binding molecules of the invention may be administered in combination with T-cell activating anti-CD3 bispecific antibodies. In one aspect, the T-cell activating anti-CD3 bispecific antibody specific for a tumor-associated antigen is an anti-CEA/anti-CD3 bispecific antibody or an anti-MCSP/anti-CD3 bispecific antibody. In one particular aspect, the T-cell activating anti-CD3 bispecific antibody specific for a tumor-associated antigen is an anti-CEA/anti-CD3 bispecific antibody.

[0721] In one aspect, a bispecific agonistic CD28 antigen binding molecule comprising at least one antigen binding domain capable of specific binding to a tumor-associated antigen (TAA) selected from the group consisting of Fibroblast Activation Protein (FAP), Carcinoembryonic Antigen (CEA), Folate receptor alpha (FolR1), Melanoma-associated Chondroitin Sulfate Proteoglycan (MCSP), Epidermal Growth Factor Receptor (EGFR), human epidermal growth factor receptor 2 (HER2) and p95HER2 is suitable for administration in combination with an anti-CEA/anti-CD3 bispecific antibody. In another particular aspect, TAA is selected from the group consisting of Fibroblast Activation Protein (FAP), Carcinoembryonic Antigen (CEA), EpCAM, HER3, CD30 or TPBG (5T4).

[0722] In a particular aspect, the anti-CD3 bispecific antibody for use in the combination comprises a first antigen binding domain comprising a heavy chain variable region (V_{H}CD3) comprising CDR-H1 sequence of SEQ ID NO:439, CDR-H2 sequence of SEQ ID NO:440, and CDR-H3 sequence of SEQ ID NO:441; and/or a light chain variable region (V_{L}CD3) comprising CDR-L1 sequence of SEQ ID NO:442, CDR-L2 sequence of SEQ ID NO:443, and CDR-L3 sequence of SEQ ID NO:444. More particularly, the anti-CD3 bispecific comprises a first antigen binding domain comprising a heavy chain variable region (V_{H}CD3) that is at least 90%, 95%, 96%, 97%, 98%, or 99% identical to the amino acid sequence of SEQ ID NO:445 and/or a light chain variable region (V_{L}CD3) that is at least 90%, 95%, 96%, 97%, 98%, or 99% identical to the amino acid sequence of SEQ ID NO:446. In a further aspect, the anti-CD3 bispecific antibody comprises a heavy chain variable region (V_{H}CD3) comprising the amino acid sequence of SEQ ID NO:445 and/or a light chain variable region (V_{L}CD3) comprising the amino acid sequence of SEQ ID NO:446.

[0723] In another aspect, the anti-CD3 bispecific antibody for use in the combination comprises a first antigen binding domain comprising a heavy chain variable region (V_{H}CD3) comprising CDR-H1 sequence of SEQ ID NO:596, CDR-H2 sequence of SEQ ID NO:597, and CDR-H3 sequence of SEQ ID NO:598; and/or a light chain variable region (V_{L}CD3) comprising CDR-L1 sequence of SEQ ID NO:599, CDR-L2 sequence of SEQ ID NO:600, and CDR-L3 sequence of SEQ ID NO:601. More particularly, the anti-CD3 bispecific comprises a first antigen binding domain comprising a heavy chain variable region (V_{H}CD3) that is at least 90%, 95%, 96%, 97%, 98%, or 99% identical to the amino acid sequence of SEQ ID NO:602 and/or a light chain variable region (V_{L}CD3) that is at least 90%, 95%, 96%, 97%, 98%, or 99% identical to the amino acid sequence of SEQ ID NO:603. In a further aspect, the anti-CD20/anti-CD3 bispecific antibody comprises a heavy chain variable region (V_{H}CD3) comprising the amino acid sequence of SEQ ID NO:602 and/or a light chain variable region (V_{L}CD3) comprising the amino acid sequence of SEQ ID NO:603.

[0724] In another aspect, the anti-CD3 bispecific antibody for use in the combination comprises a first antigen binding domain comprising a heavy chain variable region (V_{H}CD3) comprising CDR-H1 sequence of SEQ ID NO:604, CDR-H2 sequence of SEQ ID NO:605, and CDR-H3 sequence of SEQ ID NO:606; and/or a light chain variable region (V_{L}CD3) comprising CDR-L1 sequence of SEQ ID NO:607, CDR-L2 sequence of SEQ ID NO:608, and CDR-L3 sequence of SEQ ID NO:609. More particularly, the anti-CD3 bispecific comprises a first antigen binding domain comprising a heavy chain variable region (V_{H}CD3) that is at least 90%, 95%, 96%, 97%, 98%, or 99% identical to the amino acid sequence of SEQ ID NO:610 and/or a light chain variable region (V_{L}CD3) that is at least 90%, 95%, 96%, 97%, 98%, or 99% identical to the amino acid sequence of SEQ ID NO:611. In a further aspect, the anti-CD20/anti-CD3 bispecific antibody comprises a heavy chain variable region (V_{H}CD3) comprising the amino acid sequence of SEQ ID NO:610 and/or a light chain variable region (V_{L}CD3) comprising the amino acid sequence of SEQ ID NO:611.

[0725] In one particular aspect, the anti-CEA/anti-CD3 bispecific antibody comprises a polypeptide that is at least 95%, 96%, 97%, 98%, or 99% identical to the sequence of SEQ ID NO: 161, a polypeptide that is at least 95%, 96%, 97%, 98%, or 99% identical to the sequence of SEQ ID NO: 162, a polypeptide that is at least 95%, 96%, 97%, 98%, or 99% identical to the sequence of SEQ ID NO: 163, and a polypeptide that is at least 95%, 96%, 97%, 98%, or 99% identical to the sequence of SEQ ID NO: 164. In a further particular embodiment, the bispecific antibody comprises a polypeptide sequence of SEQ ID NO: 161, a polypeptide sequence of SEQ ID NO: 162, a polypeptide sequence of SEQ ID NO: 163 and a polypeptide sequence of SEQ ID NO: 164 (CEA CD3 TCB).

[0726] In another particular aspect, the anti-CEA/anti-CD3 bispecific antibody comprises a polypeptide that is at least 95%, 96%, 97%, 98%, or 99% identical to the sequence of SEQ ID NO: 165, a polypeptide that is at least 95%, 96%, 97%, 98%, or 99% identical to the sequence of SEQ ID NO: 166, a polypeptide that is at least 95%, 96%, 97%, 98%, or 99% identical to the sequence of SEQ ID NO: 167, and a polypeptide that is at least 95%, 96%, 97%, 98%, or 99% identical to the sequence of SEQ ID NO: 168. In a further particular embodiment, the bispecific antibody comprises a polypeptide sequence of SEQ ID NO: 165, a polypeptide sequence of SEQ ID NO: 166, a polypeptide sequence of SEQ ID NO: 167 and a polypeptide sequence of SEQ ID NO:168 (CEACAM5 CD3 TCB).

[0727] Particular bispecific antibodies are further described in PCT publication no. WO 2014/131712 A1. In a further aspect, the anti-CEA/anti-CD3 bispecific antibody may also comprise a bispecific T cell engager (BiTEi®). In a further aspect, the anti-CEA/anti-CD3 bispecific antibody is a bispecific antibody as described in WO 2007/071426 or WO 2014/131712.

[0728] In another aspect, a bispecific agonistic CD28 antigen binding molecule of the invention comprising an antigen binding domain capable of specific binding to a B cell surface antigen may be administered in combination with T-cell activating anti-CD3 bispecific antibodies. In one aspect, the T-cell activating anti-CD3 bispecific antibody is specific for a B cell surface antigen, in particular it is an anti-CD20/anti-CD3 bispecific antibody.

[0729] The anti-CD20/anti-CD3 bispecific antibodies as used herein are bispecific antibodies comprising a first antigen binding domain that binds to CD3, and a second antigen binding domain that binds to CD20. Thus, the anti-CD20/anti-CD3 bispecific antibody as used herein comprises a first antigen binding domain comprising a heavy chain variable region (V_{H}CD3) and a light chain variable region (V_{L}CD3), and a second antigen binding domain comprising a heavy chain variable region (V_{H}CD20) and a light chain variable region (V_{L}CD20).

[0730] In a particular aspect, the anti-CD20/anti-CD3 bispecific antibody for use in the combination comprises a first antigen binding domain comprising a heavy chain variable region (V_{H}CD3) comprising CDR-H1 sequence of SEQ ID NO:439, CDR-H2 sequence of SEQ ID NO:440, and CDR-H3 sequence of SEQ ID NO:441; and/or a light chain variable region (V_{L}CD3) comprising CDR-L1 sequence of SEQ ID NO:442, CDR-L2 sequence of SEQ ID NO:443, and CDR-L3 sequence of SEQ ID NO:444. More particularly, the anti-CD20/anti-CD3 bispecific comprises a first antigen binding domain comprising a heavy chain variable region (V_{H}CD3) that is at least 90%, 95%, 96%, 97%, 98%, or 99% identical to the amino acid sequence of SEQ ID NO:445 and/or a light chain variable region (V_{L}CD3) that is at least 90%, 95%, 96%, 97%, 98%, or 99% identical to the amino acid sequence of SEQ ID NO:446. In a further aspect, the anti-CD20/anti-CD3 bispecific antibody comprises a heavy chain variable region (V_{H}CD3) comprising the amino acid sequence of SEQ ID NO:445 and/or a light chain variable region (V_{L}CD3) comprising the amino acid sequence of SEQ ID NO:446.

[0731] In one aspect, the antibody that specifically binds to CD3 is a full-length antibody. In one aspect, the antibody that specifically binds to CD3 is an antibody of the human IgG class, particularly an antibody of the human IgG₁ class. In one aspect, the antibody that specifically binds to CD3 is an antibody fragment, particularly a Fab molecule or a scFv molecule, more particularly a Fab molecule. In a particular aspect, the antibody that specifically binds to CD3 is a crossover Fab molecule wherein the variable domains or the constant domains of the Fab heavy and light chain are exchanged (i.e. replaced by each other). In one aspect, the antibody that specifically binds to CD3 is a humanized antibody.

[0732] In another aspect, the anti-CD20/anti-CD3 bispecific antibody comprises a second antigen binding domain comprising a heavy chain variable region (V_{H}CD20) comprising CDR-H1 sequence of SEQ ID NO:447, CDR-H2 sequence of SEQ ID NO:448, and CDR-H3 sequence of SEQ ID NO:449, and/or a light chain variable region (V_{L}CD20) comprising CDR-L1 sequence of SEQ ID NO:450, CDR-L2 sequence of SEQ ID NO:451, and CDR-L3 sequence of SEQ ID NO:452. More particularly, the anti-CD20/anti-CD3 bispecific comprises a second antigen binding domain comprising a heavy chain variable region (V_{H}CD20) that is at least 90%, 95%, 96%, 97%, 98%, or 99% identical to the amino acid sequence of SEQ ID NO:453 and/or a light chain variable region (V_{L}CD20) that is at least 90%, 95%, 96%, 97%, 98%, or 99% identical to the amino acid sequence of SEQ ID NO:454. In a further aspect, the anti-CD20/anti-CD3 bispecific comprises a second antigen binding domain comprising a heavy chain variable region (V_{H}CD20) comprising the amino acid sequence of SEQ ID NO:453 and/or a light chain variable region (V_{L}CD20) comprising the amino acid sequence of SEQ ID NO:454.

[0733] In another particular aspect, the anti-CD20/anti-CD3 bispecific antibody comprises a third antigen binding domain that binds to CD20. In particular, the anti-CD20/anti-CD3 bispecific antibody comprises a third antigen binding domain comprising a heavy chain variable region (V_{H}CD20) comprising CDR-H1 sequence of SEQ ID NO:447, CDR-H2 sequence of SEQ ID NO:448, and CDR-H3 sequence of SEQ ID NO:449; and/or a light chain variable region (V_{L}CD20) comprising CDR-L1 sequence of SEQ ID NO:450, CDR-L2 sequence of SEQ ID NO:451, and CDR-L3 sequence of SEQ ID NO:452. More particularly, the anti-CD20/anti-CD3 bispecific comprises a third antigen binding domain comprising a heavy chain variable region (V_{H}CD20) that is at least 90%, 95%, 96%, 97%, 98%, or 99% identical to the amino acid sequence of SEQ ID NO:453 and/or a light chain variable region (V_{L}CD20) that is at least 90%, 95%, 96%, 97%, 98%, or 99% identical to the amino acid sequence of SEQ ID NO:454. In a further aspect, the anti-CD20/anti-CD3 bispecific comprises a third antigen binding domain comprising a heavy chain variable region (V_{H}CD20) comprising the amino acid sequence of SEQ ID NO:453 and/or a light chain variable region (V_{L}CD20) comprising the amino acid sequence of SEQ ID NO:454.

[0734] In a further aspect, the anti-CD20/anti-CD3 bispecific antibody is bispecific antibody, wherein the first antigen binding domain is a cross-Fab molecule wherein the variable domains or the constant domains of the Fab heavy and light chain are exchanged, and the second and third, if present, antigen binding domain is a conventional Fab molecule.

[0735] In another aspect, the anti-CD20/anti-CD3 bispecific antibody is bispecific antibody, wherein (i) the second antigen binding domain is fused at the C-terminus of the Fab heavy chain to the N-terminus of the Fab heavy chain of the first antigen binding domain, the first antigen binding domain is fused at the C-terminus of the Fab heavy chain to the N-terminus of the first subunit of the Fc domain, and the third antigen binding domain is fused at the C-terminus of the Fab heavy chain to the N-terminus of the second subunit of the Fc domain, or (ii) the first antigen binding domain is fused at the C-terminus of the Fab heavy chain to the N-terminus of the Fab heavy chain of the second antigen binding domain, the second antigen binding domain is fused at the C-terminus of the Fab heavy chain to the N-terminus of the first subunit of the Fc domain, and the third antigen binding domain is fused at the C-terminus of the Fab heavy chain to the N-terminus of the second subunit of the Fc domain.

[0736] The Fab molecules may be fused to the Fc domain or to each other directly or through a peptide linker, comprising one or more amino acids, typically about 2-20 amino acids. Peptide linkers are known in the art and are described herein. In one aspect, said peptide linker is (G₄S)₂ (SEQ ID NO: 147). Another suitable such linker comprises the sequence (G₄S)₄ (SEQ ID NO:152). Additionally, linkers may comprise (a portion of) an immunoglobulin hinge region.

[0737] Particularly where a Fab molecule is fused to the N-terminus of an Fc domain subunit, it may be fused via an immunoglobulin hinge region or a portion thereof, with or without an additional peptide linker. In a further aspect, the anti-CD20/anti-CD3 bispecific antibody comprises an Fc domain comprising one or more amino acid substitutions that reduce binding to an Fc receptor and/or effector function. In particular, the anti-CD20/anti-CD3 bispecific antibody comprises an IgG1 Fc domain comprising the amino acid substitutions L234A, L235A and P329G.

[0738] In a particular aspect, the anti-CD20/anti-CD3 bispecific antibody comprises a polypeptide that is at least 95%, 96%, 97%, 98%, or 99% identical to the sequence of SEQ ID NO: 455, a polypeptide that is at least 95%, 96%, 97%, 98%, or 99% identical to the sequence of SEQ ID NO: 456, a polypeptide that is at least 95%, 96%, 97%, 98%, or 99% identical to the sequence of SEQ ID NO: 457, and a polypeptide that is at least 95%, 96%, 97%, 98%, or 99% identical to the sequence of SEQ ID NO: 458. In a further particular embodiment, the bispecific antibody comprises a polypeptide sequence of SEQ ID NO: 455, a polypeptide sequence of SEQ ID NO: 456, a polypeptide sequence of SEQ ID NO: 457 and a polypeptide sequence of SEQ ID NO: 458 (CD20 TCB).

[0739] Particular bispecific antibodies are described in PCT publication no. WO 2016/020309 A1 or in WO 2015/095392 A1. In a further aspect, the anti-CD20/anti-CD3 bispecific antibody may also comprise a bispecific T cell engager (BiTE®). In a further aspect, the anti-CD20/anti-CD3 bispecific antibody is XmAb®13676. In another aspect, the bispecific antibody is REGN1979. In another aspect, the the bispecific antibody is FBTA05 (Lymphomun).

[0740] In another aspect of the invention, the bispecific agonistic CD28 antigen binding molecule of the invention is for use in a method for treating or delaying progression of cancer, wherein the bispecific agonistic CD28 antigen binding molecule is used in combination with an anti-CD20/anti-CD3 bispecific antibody, and additionally they are combined with an agent blocking PD-L1/PD-1 interaction. An agent blocking PD-L1/PD-1 interaction is a PD-L1 binding antagonist or a PD-1 binding antagonist. In particular, the agent blocking PD-L1/PD-1 interaction is an anti-PD-L1 antibody or an anti-PD-1 antibody.

[0741] In another aspect, a bispecific agonistic CD28 antigen binding molecule of the invention comprising an antigen binding domain capable of specific binding to MM cell surface antigen may be administered in combination with T-cell activating anti-CD3 bispecific antibodies. In one aspect, the T-cell activating anti-CD3 bispecific antibody is specific for a MM cell surface antigen, in particular it is an anti-GPRC5D/anti-CD3 bispecific antibody.

[0742] In one particular aspect, the anti-GPRC5D/anti-CD3 bispecific antibody comprises a polypeptide that is at least 95%, 96%, 97%, 98%, or 99% identical to the sequence of SEQ ID NO: 398, a polypeptide that is at least 95%, 96%, 97%, 98%, or 99% identical to the sequence of SEQ ID NO: 399, a polypeptide that is at least 95%, 96%, 97%, 98%, or 99% identical to the sequence of SEQ ID NO: 404, and a polypeptide that is at least 95%, 96%, 97%, 98%, or 99% identical to the sequence of SEQ ID NO: 405. In a further particular aspect, the bispecific antibody comprises a polypeptide sequence of SEQ ID NO: 398, a polypeptide sequence of SEQ ID NO: 399, a polypeptide sequence of SEQ ID NO: 404 and a polypeptide sequence of SEQ ID NO: 405 (GPRC5D CD3 TCB).

[0743] In another aspect, provided is a combination product comprising a bispecific agonistic CD28 antigen binding molecule as described herein and a T-cell activating anti-CD3 bispecific antibody. In one aspect, the T-cell activating anti-CD3 bispecific antibody specific for a tumor-associated antigen is an anti-CEA/anti-CD3 bispecific antibody or an anti-MCSP/anti-CD3 bispecific antibody. In one particular aspect, the T-cell activating anti-CD3 bispecific antibody specific for a tumor-associated antigen is an anti-CEA/anti-CD3 bispecific antibody. In another aspect, the the T-cell activating anti-CD3 bispecific antibody specific for a tumor-associated antigen is an anti-CD20/anti-CD3 bispecific antibody. In a further aspect, the T-cell activating anti-CD3 bispecific antibody specific for a tumor-associated antigen is an anti-GPRC5D/anti-CD3 bispecific antibody.

[0744] Combination with Agents Blocking PD-L1/PD-1 Interaction

[0745] In one aspect, the bispecific agonistic CD28 antigen binding molecules of the invention may be administered in combination with agents blocking PD-L1/PD-1 interaction such as a PD-L1 binding antagonist or a PD-1 binding antagonist, in particular an anti-PD-L1 antibody or an anti-PD-1 antibody.

[0746] In one aspect, the agent blocking PD-L1/PD-1 interaction is an anti-PD-L1 antibody. The term “PD-L1”, also known as CD274 or B7-H1, refers to any native PD-L1 from any vertebrate source, including mammals such as primates (e.g. humans) non-human primates (e.g. cynomolgus monkeys) and rodents (e.g. mice and rats), in particular to “human PD-L1”. The amino acid sequence of complete human PD-L1 is shown in UniProt (www.uniprot.org) accession no. Q9NZQ7 (SEQ ID NO:459). The term “PD-L1 binding antagonist” refers to a molecule that decreases, blocks, inhibits, abrogates or interferes with signal transduction resulting from the interaction of PD-L1 with either one or more of its binding partners, such as PD-1, B7-1. In some aspects, a PD-L1 binding antagonist is a molecule that inhibits the binding of PD-L1 to its binding partners. In a specific aspect, the PD-L1 binding antagonist inhibits binding of PD-L1 to PD-1 and/or B7-1. In some aspects, the PD-L1 binding antagonists include anti-PD-L1 antibodies, antigen binding fragments thereof, immunoadhesins, fusion proteins, oligopeptides and other molecules that decrease, block, inhibit, abrogate or interfere with signal transduction resulting from the interaction of PD-L1 with one or more of its binding partners, such as PD-1, B7-1. In one aspect, a PD-L1 binding antagonist reduces the negative co-stimulatory signal mediated by or through cell surface proteins expressed on T lymphocytes mediated signaling through PD-L1 so as to render a dysfunctional T-cell less dysfunctional (e.g., enhancing effector responses to antigen recognition). In particular, a PD-L1 binding antagonist is an anti-PD-L1 antibody. The term “anti-PD-L1 antibody” or “antibody binding to human PD-L1” or “antibody that specifically binds to human PD-L1” or “antagonistic anti-PD-L1” refers to an antibody specifically binding to the human PD-L1 antigen with a binding affinity of KD-value of 1.0×10⁻⁸ mol/l or lower, in one aspect of a K_{D}-value of 1.0×10⁻⁹ mol/l or lower. The binding affinity is determined with a standard binding assay, such as surface plasmon resonance technique (BIAcore®, GE-Healthcare Uppsala, Sweden). In a particular aspect, the agent blocking PD-L1/PD-1 interaction is an anti-PD-L1 antibody. In a specific aspect, the anti-PD-L1 antibody is selected from the group consisting of atezolizumab (MPDL3280A, RG7446), durvalumab (MEDI4736), avelumab (MSB0010718C) and MDX-1105. In a specific aspect, an anti-PD-L1 antibody is YW243.55.S70 described herein. In another specific aspect, an anti-PD-L1 antibody is MDX-1105 described herein. In still another specific aspect, an anti-PD-L1 antibody is MEDI4736 (durvalumab). In yet a further aspect, an anti-PD-L1 antibody is MSB0010718C (avelumab). More particularly, the agent blocking PD-L1/PD-1 interaction is atezolizumab (MPDL3280A). In another aspect, the agent blocking PD-L1/PD-1 interaction is an anti-PD-L1 antibody comprising a heavy chain variable domain VH(PDL-1) of SEQ ID NO:460 and a light chain variable domain VL(PDL-1) of SEQ ID NO:461. In another aspect, the agent blocking PD-L1/PD-1 interaction is an anti-PD-L1 antibody comprising a heavy chain variable domain VH(PDL-1) of SEQ ID NO:462 and a light chain variable domain VL(PDL-1) of SEQ ID NO:463.

[0747] The term “PD-1”, also known as CD279, PD1 or programmed cell death protein 1, refers to any native PD-L1 from any vertebrate source, including mammals such as primates (e.g. humans) non-human primates (e.g. cynomolgus monkeys) and rodents (e.g. mice and rats), in particular to the human protein PD-1 with the amino acid sequence as shown in UniProt (www.uniprot.org) accession no. Q15116 (SEQ ID NO:464). The term “PD-1 binding antagonist” refers to a molecule that inhibits the binding of PD-1 to its ligand binding partners. In some embodiments, the PD-1 binding antagonist inhibits the binding of PD-1 to PD-L1. In some embodiments, the PD-1 binding antagonist inhibits the binding of PD-1 to PD-L2. In some embodiments, the PD-1 binding antagonist inhibits the binding of PD-1 to both PD-L1 and PD-L2. In particular, a PD-L1 binding antagonist is an anti-PD-L1 antibody. The term “anti-PD-1 antibody” or “antibody binding to human PD-1” or “antibody that specifically binds to human PD-1” or “antagonistic anti-PD-1” refers to an antibody specifically binding to the human PD1 antigen with a binding affinity of K_{D}-value of 1.0×10⁻⁸ mol/l or lower, in one aspect of a K_{D}-value of 1.0×10⁻⁹ mol/l or lower. The binding affinity is determined with a standard binding assay, such as surface plasmon resonance technique (BIAcore®, GE-Healthcare Uppsala, Sweden). In one aspect, the agent blocking PD-L1/PD-1 interaction is an anti-PD-1 antibody. In a specific aspect, the anti-PD-1 antibody is selected from the group consisting of MDX 1106 (nivolumab), MK-3475 (pembrolizumab), CT-011 (pidilizumab), MEDI-0680 (AMP-514), PDR001, REGN2810, and BGB-108, in particular from pembrolizumab and nivolumab. In another aspect, the agent blocking PD-L1/PD-1 interaction is an anti-PD-1 antibody comprising a heavy chain variable domain VH(PD-1) of SEQ ID NO:465 and a light chain variable domain VL(PD-1) of SEQ ID NO:466. In another aspect, the agent blocking PD-L1/PD-1 interaction is an anti-PD-1 antibody comprising a heavy chain variable domain VH(PD-1) of SEQ ID NO:467 and a light chain variable domain VL(PD-1) of SEQ ID NO:468.

[0748] In another aspect, provided is a combination product comprising a bispecific agonistic CD28 antigen binding molecule as described herein and an agents blocking PD-L1/PD-1 interaction such as a PD-L1 binding antagonist or a PD-1 binding antagonist, in particular an anti-PD-L1 antibody or an anti-PD-1 antibody.

[0749] Such combination therapies noted above encompass combined administration (where two or more therapeutic agents are included in the same or separate formulations), and separate administration, in which case, administration of the therapeutic agent can occur prior to, simultaneously, and/or following, administration of an additional therapeutic agent or agents. In one embodiment, administration of the therapeutic agent and administration of an additional therapeutic agent occur within about one month, or within about one, two or three weeks, or within about one, two, three, four, five, or six days, of each other.

[0750] Articles of Manufacture

[0751] In another aspect of the invention, an article of manufacture containing materials useful for the treatment, prevention and/or diagnosis of the disorders described above is provided. The article of manufacture comprises a container and a label or package insert on or associated with the container. Suitable containers include, for example, bottles, vials, syringes, IV solution bags, etc. The containers may be formed from a variety of materials such as glass or plastic. The container holds a composition which is by itself or combined with another composition effective for treating, preventing and/or diagnosing the condition and may have a sterile access port (for example the container may be an intravenous solution bag or a vial having a stopper that is pierceable by a hypodermic injection needle). At least one active agent in the composition is a bispecific agonistic CD28 antigen binding molecule of the invention. The label or package insert indicates that the composition is used for treating the condition of choice. Moreover, the article of manufacture may comprise (a) a first container with a composition contained therein, wherein the composition comprises a bispecific agonistic CD28 antigen binding molecule of the invention; and (b) a second container with a composition contained therein, wherein the composition comprises a further cytotoxic or otherwise therapeutic agent. The article of manufacture in this embodiment of the invention may further comprise a package insert indicating that the compositions can be used to treat a particular condition. Alternatively, or additionally, the article of manufacture may further comprise a second (or third) container comprising a pharmaceutically-acceptable buffer, such as bacteriostatic water for injection (BWFI), phosphate-buffered saline, Ringer's solution and dextrose solution. It may further include other materials desirable from a commercial and user standpoint, including other buffers, diluents, filters, needles, and syringes.

TABLE B
(Sequences):

| SEQ | | |
|---|---|---|
| ID NO: | Name | Sequence |
| 1 | hu CD28 | UniProt no. P10747, version 1 |
| 2 | hu FAP | UniProt no. Q12884, version 168 |
| 3 | hu CEA | UniProt accession no. P06731 |
| 4 | FAP (28H1) CDR-H1 | SHAMS |
| 5 | FAP (28H1) CDR-H2 | AIWASGEQYYADSVKG |
| 6 | FAP (28H1) CDR-H3 | GWLGNFDY |
| 7 | FAP (28H1) CDR-L1 | RASQSVSRSYLA |
| 8 | FAP (28H1) CDR-L2 | GASTRAT |
| 9 | FAP (28H1) CDR-L3 | QQGQVIPPT |
| 10 | FAP(28H1) VH | EVQLLESGGGLVQPGGSLRLSCAASGFTFSSHAMSWVRQAPGKGL |
| | | EWVSAIWASGEQYYADSVKGRFTISRDNSKNTLYLQMNSLRAEDT |
| | | AVYYCAKGWLGNFDYWGQGTLVTVSS |
| 11 | FAP(28H1) VL | EIVLTQSPGTLSLSPGERATLSCRASQSVSRSYLAWYQQKPGQAP |
| | | RLLIIGASTRATGIPDRFSGSGSGTDFTLTISRLEPEDFAVYYCQ |
| | | QGQVIPPTFGQGTKVEIK |
| 12 | FAP(4B9) CDR-H1 | SYAMS |
| 13 | FAP(4B9) CDR-H2 | AIIGSGASTYYADSVKG |
| 14 | FAP(4B9) CDR-H3 | GWFGGFNY |
| 15 | FAP(4B9) CDR-L1 | RASQSVTSSYLA |
| 16 | FAP(4B9) CDR-L2 | VGSRRAT |
| 17 | FAP(4B9) CDR-L3 | QQGIMLPPT |
| 18 | FAP(4B9) VH | EVQLLESGGGLVQPGGSLRLSCAASGFTFSSYAMSWVRQAPGKGL |
| | | EWVSAIIGSGASTYYADSVKGRFTISRDNSKNTLYLQMNSLRAED |
| | | TAVYYCAKGWFGGFNYWGQGTLVTVSS |
| 19 | FAP(4B9) VL | EIVLTQSPGTLSLSPGERATLSCRASQSVTSSYLAWYQQKPGQAP |
| | | RLLINVGSRRATGIPDRFSGSGSGTDFTLTISRLEPEDFAVYYCQ |
| | | QGIMLPPTFGQGTKVEIK |
| 20 | CD28(SA) CDR-H1 | SYYIH |
| 21 | CD28(SA) CDR-H2 | CIYPGNVNTNYNEKFKD |
| 22 | CD28(SA) CDR-H3 | SHYGLDWNFDV |
| 23 | CD28(SA) CDR-L1 | HASQNIYVWLN |
| 24 | CD28(SA) CDR-L2 | KASNLHT |
| 25 | CD28(SA) CDR-L3 | QQGQTYPYT |
| 26 | CD28(SA) VH | QVQLVQSGAEVKKPGASVKVSCKASGYTFTSYYIHWVRQAPGQGL |
| | | EWIGCIYPGNVNTNYNEKFKDRATLTVDTSISTAYMELSRLRSDD |
| | | TAVYFCTRSHYGLDWNFDVWGQGTTVTVSS |
| 27 | CD28(SA) VL | DIQMTQSPSSLSASVGDRVTITCHASQNIYVWLNWYQQKPGKAPK |
| | | LLIYKASNLHTGVPSRFSGSGSGTDFTLTISSLQPEDFATYYCQQ |
| | | GQTYPYTFGGGTKVEIK |
| 28 | CD28(mAb 9.3) CDR- | DYGVH |
| | H1 | |
| 29 | CD28(mAb 9.3) CDR- | VIWAGGGTNYNSALMS |
| | H2 | |
| 30 | CD28(mAb 9.3) CDR- | DKGYSYYYSMDY |
| | H3 | |
| 31 | CD28(mAb 9.3) CDR- | RASESVEYYVTSLMQ |
| | L1 | |
| 32 | CD28(mAb 9.3) CDR- | AASNVES |
| | L2 | |
| 33 | CD28(mAb 9.3) CDR- | QQSRKVPYT |
| | L3 | |
| 34 | CD28(mAb 9.3) VH | EVKLQQSGPGLVTPSQSLSITCTVSGFSLSDYGVHWVRQSPGQGL |
| | | EWLGVIWAGGGTNYNSALMSRKSISKDNSKSQVFLKMNSLQADDT |
| | | AVYYCARDKGYSYYYSMDYWGQGTSVTVSS |
| 35 | CD28(mAb 9.3) VL | DIELTQSPASLAVSLGQRATISCRASESVEYYVTSLMQWYQQKPG |
| | | QPPKLLIFAASNVESGVPARFSGSGSGTNFSLNIHPVDEDDVAMY |
| | | FCQQSRKVPYTFGGGTKLEIK |
| 36 | CD28 CDR-H1 | SYYIH |
| | consensus | |
| 37 | CD28 CDR-H2 | SIYPX₁X₂X₃X₄TNYNEKFKD, wherein |
| | consensus | X₁ is G or R |
| | | X₂ is N or D |
| | | X₃ is V or G |
| | | X₄ is N or Q or A |
| 38 | CD28 CDR-H3 | SHYGX₅DX₆NFDV, wherein |
| | consensus | X₅ is L or A |
| | | X₆ is W or H or Y or F |
| 39 | CD28 CDR-L1 | X₇ASQX₈IX₉X₁₀X₁₁LN, wherein |
| | consensus | X₇ is H or R |
| | | X₈ is N or G |
| | | X₉ is Y or S |
| | | X₁₀ is V or N |
| | | X₁₁ is W or H or F or Y |
| 40 | CD28 CDR-L2 | X₁₂X₁₃SX₁₄LX₁₅X₁₆, wherein |
| | consensus | X₁₂ is K or Y |
| | | X₁₃ is A or T |
| | | X₁₄ is N or S |
| | | X₁₅ is H or Y |
| | | X₁₆ is T or S |
| 41 | CD28 CDR-L3 | QQX₁₇QTYPYT, wherein |
| | consensus | X₁₇ is G or A |
| 42 | CD28 VH variant a | QVQLVQSGAEVKKPGASVKVSCKASGYTFTSYYIHWVRQAPGQGLEWIGS |
| | | IYPGNVNTNYNEKFKDRATLTVDTSISTAYMELSRLRSDDTAVYFCTRSH |
| | | YGLDWNFDVWGQGTTVTVSS |
| 43 | CD28 VH variant b | QVQLVQSGAEVKKPGASVKVSCKASGYTFTSYYIHWVRQAPGQGLEWIGS |
| | | IYPGNVQTNYNEKFKDRATLTVDTSISTAYMELSRLRSDDTAVYFCTRSH |
| | | YGLDHNFDVWGQGTTVTVSS |
| 44 | CD28 VH variant c | QVQLVQSGAEVKKPGASVKVSCKASGYTFTSYYIHWVRQAPGQGLEWIGS |
| | | IYPGNVQTNYNEKFKDRATLTVDTSISTAYMELSRLRSDDTAVYFCTRSH |
| | | YGADHNFDVWGQGTTVTVSS |
| 45 | CD28 VH variant d | QVQLVQSGAEVKKPGASVKVSCKASGYTFTSYYIHWVRQAPGQGLEWIGS |
| | | IYPRDGQTNYNEKFKDRATLTVDTSISTAYMELSRLRSDDTAVYFCTRSH |
| | | YGLDYNFDVWGQGTTVTVSS |
| 46 | CD28 VH variant e | QVQLVQSGAEVKKPGASVKVSCKASGYTFTSYYIHWVRQAPGQGLEWIGS |
| | | IYPGNVQTNYNEKFKDRATLTVDTSISTAYMELSRLRSDDTAVYFCTRSH |
| | | YGLDWNFDVWGQGTTVTVSS |
| 47 | CD28 VH variant f | QVQLVQSGAEVKKPGASVKVSCKASGYTFTSYYIHWVRQAPGQGLEWIGS |
| | | IYPGNVQTNYNEKFKDRATLTVDTSISTAYMELSRLRSDDTAVYFCTRSH |
| | | YGLDFNFDVWGQGTTVTVSS |
| 48 | CD28 VH variant g | QVQLVQSGAEVKKPGASVKVSCKASGYTFTSYYIHWVRQAPGQGLEWIGS |
| | | IYPRNVQTNYNEKFKDRATLTVDTSISTAYMELSRLRSDDTAVYFCTRSH |
| | | YGLDHNFDVWGQGTTVTVSS |
| 49 | CD28 VH variant h | QVQLVQSGAEVKKPGASVKVSCKASGYTFTSYYIHWVRQAPGQGLEWIGS |
| | | IYPRDVQTNYNEKFKDRATLTVDTSISTAYMELSRLRSDDTAVYFCTRSH |
| | | YGLDHNFDVWGQGTTVTVSS |
| 50 | CD28 VH variant i | EVQLVESGGGLVQPGGSLRLSCAASGFTFTSYYIHWVRQAPGKGLEWVAS |
| | | IYPGNVNTRYADSVKGRFTISADTSKNTAYLQMNSLRAEDTAVYYCTRSH |
| | | YGLDWNFDVWGQGTTVTVSS |
| 51 | CD28 VH variant j | EVQLVESGGGLVQPGGSLRLSCAASGFTFTSYYIHWVRQAPGKGLEWVAS |
| | | IYPGNVATRYADSVKGRFTISADTSKNTAYLQMNSLRAEDTAVYYCTRSH |
| | | YGLDWNFDVWGQGTTVTVSS |
| 52 | CD28 VL variant k | DIQMTQSPSSLSASVGDRVTITCHASQNIYVHLNWYQQKPGKAPKLLIYK |
| | | ASNLHTGVPSRFSGSGSGTDFTLTISSLQPEDFATYYCQQAQTYPYTFGG |
| | | GTKVEIK |
| 53 | CD28 VL variant l | DIQMTQSPSSLSASVGDRVTITCHASQNIYVFLNWYQQKPGKAPKLLIYK |
| | | ASNLHTGVPSRFSGSGSGTDFTLTISSLQPEDFATYYCQQGQTYPYTFGG |
| | | GTKVEIK |
| 54 | CD28 VL variant m | DIQMTQSPSSLSASVGDRVTITCHASQNIYVYLNWYQQKPGKAPKLLIYK |
| | | ASNLHTGVPSRFSGSGSGTDFTLTISSLQPEDFATYYCQQGQTYPYTFGG |
| | | GTKVEIK |
| 55 | CD28 VL variant n | DIQMTQSPSSLSASVGDRVTITCHASQGISNYLNWYQQKPGKAPKLLIYK |
| | | ASNLHTGVPSRFSGSGSGTDFTLTISSLQPEDFATYYCQQGQTYPYTFGG |
| | | GTKVEIK |
| 56 | CD28 VL variant o | DIQMTQSPSSLSASVGDRVTITCHASQNIYVWLNWYQQKPGKAPKLLIYY |
| | | TSSLHSGVPSRFSGSGSGTDFTLTISSLQPEDFATYYCQQGQTYPYTFGG |
| | | GTKVEIK |
| 57 | CD28 VL variant p | DIQMTQSPSSLSASVGDRVTITCHASQGISNYLNWYQQKPGKAPKLLIYY |
| | | TSSLHSGVPSRFSGSGSGTDFTLTISSLQPEDFATYYCQQGQTYPYTFGG |
| | | GTKVEIK |
| 58 | CD28 VL variant q | DIQMTQSPSSLSASVGDRVTITCHASQGISNHLNWYQQKPGKAPKLLIYK |
| | | ASNLHTGVPSRFSGSGSGTDFTLTISSLQPEDFATYYCQQGQTYPYTFGG |
| | | GTKVEIK |
| 59 | CD28 VL variant r | DIQMTQSPSSLSASVGDRVTITCHASQGIYVYLNWYQQKPGKAPKLLIYK |
| | | ASNLHTGVPSRFSGSGSGTDFTLTISSLQPEDFATYYCQQGQTYPYTFGG |
| | | GTKVEIK |
| 60 | CD28 VL variant s | DIQMTQSPSSLSASVGDRVTITCHASQGISVYLNWYQQKPGKAPKLLIYK |
| | | ASNLHTGVPSRFSGSGSGTDFTLTISSLQPEDFATYYCQQGQTYPYTFGG |
| | | GTKVEIK |
| 61 | CD28 VL variant t | DIQMTQSPSSLSASVGDRVTITCRASQNIYVWLNWYQQKPGKAPKLLIYK |
| | | ASNLYSGVPSRFSGSRSGTDFTLTISSLQPEDFATYYCQQGQTYPYTFGQ |
| | | GTKLEIK |
| 62 | CD28(SA) light chain | DIQMTQSPSSLSASVGDRVTITCHASQNIYVWLNWYQQKPGKAPK |
| | | LLIYKASNLHTGVPSRFSGSGSGTDFTLTISSLQPEDFATYYCQQ |
| | | GQTYPYTFGGGTKVEIKRTVAAPSVFIFPPSDEQLKSGTASVVCL |
| | | LNNFYPREAKVQWKVDNALQSGNSQESVTEQDSKDSTYSLSSTLT |
| | | LSKADYEKHKVYACEVTHQGLSSPVTKSFNRGEC |
| 63 | CD28(SA) hu IgG4 | QVQLVQSGAEVKKPGASVKVSCKASGYTFTSYYIHWVRQAPGQGL |
| | heavy chain | EWIGCIYPGNVNTNYNEKFKDRATLTVDTSISTAYMELSRLRSDD |
| | | TAVYFCTRSHYGLDWNFDVWGQGTTVTVSSASTKGPSVFPLAPCS |
| | | RSTSESTAALGCLVKDYFPEPVTVSWNSGALTSGVHTFPAVLQSS |
| | | GLYSLSSVVTVPSSSLGTKTYTCNVDHKPSNTKVDKRVESKYGPP |
| | | CPSCPAPEFLGGPSVFLFPPKPKDTLMISRTPEVTCVVVDVSQED |
| | | PEVQFNWYVDGVEVHNAKTKPREEQFNSTYRVVSVLTVLHQDWLN |
| | | GKEYKCKVSNKGLPSSIEKTISKAKGQPREPQVYTLPPSQEEMTK |
| | | NQVSLTCLVKGFYPSDIAVEWESNGQPENNYKTTPPVLDSDGSFF |
| | | LYSRLTVDKSRWQEGNVFSCSVMHEALHNHYTQKSLSLSLGK |
| 64 | CD28(SA) hu IgG1 | QVQLVQSGAEVKKPGASVKVSCKASGYTFTSYYIHWVRQAPGQGL |
| | PGLALA heavy chain | EWIGCIYPGNVNTNYNEKFKDRATLTVDTSISTAYMELSRLRSDD |
| | | TAVYFCTRSHYGLDWNFDVWGQGTTVTVSSASTKGPSVFPLAPSS |
| | | KSTSGGTAALGCLVKDYFPEPVTVSWNSGALTSGVHTFPAVLQSS |
| | | GLYSLSSVVTVPSSSLGTQTYICNVNHKPSNTKVDKKVEPKSCDK |
| | | THTCPPCPAPEAAGGPSVFLFPPKPKDTLMISRTPEVTCVVVDVS |
| | | HEDPEVKFNWYVDGVEVHNAKTKPREEQYNSTYRVVSVLTVLHQD |
| | | WLNGKEYKCKVSNKALGAPIEKTISKAKGQPREPQVYTLPPSRDE |
| | | LTKNQVSLTCLVKGFYPSDIAVEWESNGQPENNYKTTPPVLDSDG |
| | | SFFLYSKLTVDKSRWQQGNVFSCSVMHEALHNHYTQKSLSLSPGK |
| 65 | VL-CD28(SA)- | DIQMTQSPSSLSASVGDRVTITCHASQNIYVWLNWYQQKPGKAPK |
| | CL“RK” | LLIYKASNLHTGVPSRFSGSGSGTDFTLTISSLQPEDFATYYCQQ |
| | | GQTYPYTFGGGTKVEIKRTVAAPSVFIFPPSDRKLKSGTASVVCL |
| | | LNNFYPREAKVQWKVDNALQSGNSQESVTEQDSKDSTYSLSSTLT |
| | | LSKADYEKHKVYACEVTHQGLSSPVTKSFNRGEC |
| 66 | CD28(SA) hu IgG1 | QVQLVQSGAEVKKPGASVKVSCKASGYTFTSYYIHWVRQAPGQGL |
| | PGLALA Fc knob | EWIGCIYPGNVNTNYNEKFKDRATLTVDTSISTAYMELSRLRSDD |
| | | TAVYFCTRSHYGLDWNFDVWGQGTTVTVSSASTKGPSVFPLAPSS |
| | | KSTSGGTAALGCLVEDYFPEPVTVSWNSGALTSGVHTFPAVLQSS |
| | | GLYSLSSVVTVPSSSLGTQTYICNVNHKPSNTKVDEKVEPKSCDK |
| | | THTCPPCPAPEAAGGPSVFLFPPKPKDTLMISRTPEVTCVVVDVS |
| | | HEDPEVKFNWYVDGVEVHNAKTKPREEQYNSTYRVVSVLTVLHQD |
| | | WLNGKEYKCKVSNKALGAPIEKTISKAKGQPREPQVYTLPPCRDE |
| | | LTKNQVSLWCLVKGFYPSDIAVEWESNGQPENNYKTTPPVLDSDG |
| | | SFFLYSKLTVDKSRWQQGNVFSCSVMHEALHNHYTQKSLSLSP |
| 67 | FAP(4B9) VL-CH hu | EIVLTQSPGTLSLSPGERATLSCRASQSVTSSYLAWYQQKPGQAP |
| | IgG1 PGLALA Fc hole | RLLINVGSRRATGIPDRFSGSGSGTDFTLTISRLEPEDFAVYYCQ |
| | | QGIMLPPTFGQGTKVEIKSSASTKGPSVFPLAPSSKSTSGGTAAL |
| | | GCLVKDYFPEPVTVSWNSGALTSGVHTFPAVLQSSGLYSLSSVVT |
| | | VPSSSLGTQTYICNVNHKPSNTKVDKKVEPKSCDKTHTCPPCPAP |
| | | EAAGGPSVFLFPPKPKDTLMISRTPEVTCVVVDVSHEDPEVKFNW |
| | | YVDGVEVHNAKTKPREEQYNSTYRVVSVLTVLHQDWLNGKEYKCK |
| | | VSNKALGAPIEKTISKAKGQPREPQVCTLPPSRDELTKNQVSLSC |
| | | AVKGFYPSDIAVEWESNGQPENNYKTTPPVLDSDGSFFLVSKLTV |
| | | DKSRWQQGNVFSCSVMHEALHNHYTQKSLSLSP |
| 68 | FAP(4B9) VH-Ckappa | EVQLLESGGGLVQPGGSLRLSCAASGETFSSYAMSWVRQAPGKGL |
| | | EWVSAIIGSGASTYYADSVKGRFTISRDNSKNTLYLQMNSLRAED |
| | | TAVYYCAKGWFGGFNYWGQGTLVTVSSASVAAPSVFIFPPSDEQL |
| | | KSGTASVVCLLNNFYPREAKVQWKVDNALQSGNSQESVTEQDSKD |
| | | STYSLSSTLTLSKADYEKHKVYACEVTHQGLSSPVTKSFNRGEC |
| 69 | CD28(SA) VHCH- | QVQLVQSGAEVKKPGASVKVSCKASGYTFTSYYIHWVRQAPGQGL |
| | VHCH Fc knob | EWIGCIYPGNVNTNYNEKFKDRATLTVDTSISTAYMELSRLRSDD |
| | FAP(4B9) VH | TAVYFCTRSHYGLDWNFDVWGQGTTVTVSSASTKGPSVFPLAPSS |
| | PGLALA | KSTSGGTAALGCLVKDYFPEPVTVSWNSGALTSGVHTFPAVLQSS |
| | | GLYSLSSVVTVPSSSLGTQTYICNVNHKPSNTKVDKKVEPKSCDG |
| | | GGGSGGGGSQVQLVQSGAEVKKPGASVKVSCKASGYTFTSYYIHW |
| | | VRQAPGQGLEWIGCIYPGNVNTNYNEKFKDRATLTVDTSISTAYM |
| | | ELSRLRSDDTAVYFCTRSHYGLDWNFDVWGQGTTVTVSSASTKGP |
| | | SVFPLAPSSKSTSGGTAALGCLVKDYFPEPVTVSWNSGALTSGVH |
| | | TFPAVLQSSGLYSLSSVVTVPSSSLGTQTYICNVNHKPSNTKVDK |
| | | KVEPKSCDKTHTCPPCPAPEAAGGPSVFLFPPKPKDTLMISRTPE |
| | | VTCVVVDVSHEDPEVKFNWYVDGVEVHNAKTKPREEQYNSTYRVV |
| | | SVLTVLHQDWLNGKEYKCKVSNKALGAPIEKTISKAKGQPREPQV |
| | | YTLPPCRDELTKNQVSLWCLVKGFYPSDIAVEWESNGQPENNYKT |
| | | TPPVLDSDGSFFLYSKLTVDKSRWQQGNVFSCSVMHEALHNHYTQ |
| | | KSLSLSPGGGGGSGGGGSGGGGSGGGGSEVQLLESGGGLVQPGGS |
| | | LRLSCAASGFTFSSYAMSWVRQAPGKGLEWVSAIIGSGASTYYAD |
| | | SVKGRFTISRDNSKNTLYLQMNSLRAEDTAVYYCAKGWFGGFNYW |
| | | GQGTLVTVSS |
| 70 | CD28(SA) VHCH- | QVQLVQSGAEVKKPGASVKVSCKASGYTFTSYYIHWVRQAPGQGL |
| | VHCH Fc hole | EWIGCIYPGNVNTNYNEKFKDRATLTVDTSISTAYMELSRLRSDD |
| | FAP(4B9) VL | TAVYFCTRSHYGLDWNFDVWGQGTTVTVSSASTKGPSVFPLAPSS |
| | PGLALA | KSTSGGTAALGCLVKDYFPEPVTVSWNSGALTSGVHTFPAVLQSS |
| | | GLYSLSSVVTVPSSSLGTQTYICNVNHKPSNTKVDKKVEPKSCDG |
| | | GGGSGGGGSQVQLVQSGAEVKKPGASVKVSCKASGYTFTSYYIHW |
| | | VRQAPGQGLEWIGCIYPGNVNTNYNEKFKDRATLTVDTSISTAYM |
| | | ELSRLRSDDTAVYFCTRSHYGLDWNFDVWGQGTTVTVSSASTKGP |
| | | SVFPLAPSSKSTSGGTAALGCLVKDYFPEPVTVSWNSGALTSGVH |
| | | TFPAVLQSSGLYSLSSVVTVPSSSLGTQTYICNVNHKPSNTKVDK |
| | | KVEPKSCDKTHTCPPCPAPEAAGGPSVFLFPPKPKDTLMISRTPE |
| | | VTCVVVDVSHEDPEVKFNWYVDGVEVHNAKTKPREEQYNSTYRVV |
| | | SVLTVLHQDWLNGKEYKCKVSNKALGAPIEKTISKAKGQPREPQV |
| | | CTLPPSRDELTKNQVSLSCAVKGFYPSDIAVEWESNGQPENNYKT |
| | | TPPVLDSDGSFFLVSKLTVDKSRWQQGNVFSCSVMHEALHNHYTQ |
| | | KSLSLSPGGGGGSGGGGSGGGGSGGGGSEIVLTQSPGTLSLSPGE |
| | | RATLSCRASQSVTSSYLAWYQQKPGQAPRLLINVGSRRATGIPDR |
| | | FSGSGSGTDFTLTISRLEPEDFAVYYCQQGIMLPPTFGQGTKVEI |
| | | K |
| 71 | CD28(SA) VHCH- Fc | QVQLVQSGAEVKKPGASVKVSCKASGYTFTSYYIHWVRQAPGQGL |
| | knob FAP(4B9) VH | EWIGCIYPGNVNTNYNEKFKDRATLTVDTSISTAYMELSRLRSDD |
| | | TAVYFCTRSHYGLDWNFDVWGQGTTVTVSSASTKGPSVFPLAPSS |
| | | KSTSGGTAALGCLVKDYFPEPVTVSWNSGALTSGVHTFPAVLQSS |
| | | GLYSLSSVVTVPSSSLGTQTYICNVNHKPSNTKVDKKVEPKSCDK |
| | | THTCPPCPAPEAAGGPSVFLFPPKPKDTLMISRTPEVTCVVVDVS |
| | | HEDPEVKFNWYVDGVEVHNAKTKPREEQYNSTYRVVSVLTVLHQD |
| | | WLNGKEYKCKVSNKALGAPIEKTISKAKGQPREPQVYTLPPCRDE |
| | | LTKNQVSLWCLVKGFYPSDIAVEWESNGQPENNYKTTPPVLDSDG |
| | | SFFLYSKLTVDKSRWQQGNVFSCSVMHEALHNHYTQKSLSLSPGG |
| | | GGGSGGGGSGGGGSGGGGSEVQLLESGGGLVQPGGSLRLSCAASG |
| | | FTFSSYAMSWVRQAPGKGLEWVSAIIGSGASTYYADSVKGRFTIS |
| | | RDNSKNTLYLQMNSLRAEDTAVYYCAKGWFGGFNYWGQGTLVTVS |
| | | S |
| 72 | CD28(SA) VHCH- Fc | QVQLVQSGAEVKKPGASVKVSCKASGYTFTSYYIHWVRQAPGQGL |
| | hole FAP(4B9) VL | EWIGCIYPGNVNTNYNEKFKDRATLTVDTSISTAYMELSRLRSDD |
| | | TAVYFCTRSHYGLDWNFDVWGQGTTVTVSSASTKGPSVFPLAPSS |
| | | KSTSGGTAALGCLVKDYFPEPVTVSWNSGALTSGVHTFPAVLQSS |
| | | GLYSLSSVVTVPSSSLGTQTYICNVNHKPSNTKVDKKVEPKSCDK |
| | | THTCPPCPAPEAAGGPSVFLFPPKPKDTLMISRTPEVTCVVVDVS |
| | | HEDPEVKFNWYVDGVEVHNAKTKPREEQYNSTYRVVSVLTVLHQD |
| | | WLNGKEYKCKVSNKALGAPIEKTISKAKGQPREPQVCTLPPSRDE |
| | | LTKNQVSLSCAVKGFYPSDIAVEWESNGQPENNYKTTPPVLDSDG |
| | | SFFLVSKLTVDKSRWQQGNVFSCSVMHEALHNHYTQKSLSLSPGG |
| | | GGGSGGGGSGGGGSGGGGSEIVLTQSPGTLSLSPGERATLSCRAS |
| | | QSVTSSYLAWYQQKPGQAPRLLINVGSRRATGIPDRFSGSGSGTD |
| | | FTLTISRLEPEDFAVYYCQQGIMLPPTFGQGTKVEIK |
| 73 | CD28(SA) VHCH | QVQLVQSGAEVKKPGASVKVSCKASGYTFTSYYIHWVRQAPGQGL |
| | “EE”- Fc PGLALA | EWIGCIYPGNVNTNYNEKFKDRATLTVDTSISTAYMELSRLRSDD |
| | FAP(4B9) VHCL | TAVYFCTRSHYGLDWNFDVWGQGTTVTVSSASTKGPSVFPLAPSS |
| | | KSTSGGTAALGCLVEDYFPEPVTVSWNSGALTSGVHTFPAVLQSS |
| | | GLYSLSSVVTVPSSSLGTQTYICNVNHKPSNTKVDEKVEPKSCDK |
| | | THTCPPCPAPEAAGGPSVFLFPPKPKDTLMISRTPEVTCVVVDVS |
| | | HEDPEVKFNWYVDGVEVHNAKTKPREEQYNSTYRVVSVLTVLHQD |
| | | WLNGKEYKCKVSNKALGAPIEKTISKAKGQPREPQVYTLPPSRDE |
| | | LTKNQVSLTCLVKGFYPSDIAVEWESNGQPENNYKTTPPVLDSDG |
| | | SFFLYSKLTVDKSRWQQGNVFSCSVMHEALHNHYTQKSLSLSPGG |
| | | GGGSGGGGSGGGGSGGGGSEVQLLESGGGLVQPGGSLRLSCAASG |
| | | FTFSSYAMSWVRQAPGKGLEWVSAIIGSGASTYYADSVKGRFTIS |
| | | RDNSKNTLYLQMNSLRAEDTAVYYCAKGWFGGFNYWGQGTLVTVS |
| | | SASVAAPSVFIFPPSDEQLKSGTASVVCLLNNFYPREAKVQWKVD |
| | | NALQSGNSQESVTEQDSKDSTYSLSSTLTLSKADYEKHKVYACEV |
| | | THQGLSSPVTKSFNRGEC |
| 74 | FAP(4B9) VLCH1 | EIVLTQSPGTLSLSPGERATLSCRASQSVTSSYLAWYQQKPGQAP |
| | | RLLINVGSRRATGIPDRFSGSGSGTDFTLTISRLEPEDFAVYYCQ |
| | | QGIMLPPTFGQGTKVEIKSSASTKGPSVFPLAPSSKSTSGGTAAL |
| | | GCLVKDYFPEPVTVSWNSGALTSGVHTFPAVLQSSGLYSLSSVVT |
| | | VPSSSLGTQTYICNVNHKPSNTKVDKKVEPKSCD |
| 75 | CD28(SA) VLCH1- | DIQMTQSPSSLSASVGDRVTITCHASQNIYVWLNWYQQKPGKAPK |
| | FAP(4B9) VHCH1 | LLIYKASNLHTGVPSRFSGSGSGTDFTLTISSLQPEDFATYYCQQ |
| | “EE”- Fc knob | GQTYPYTFGGGTKVEIKSSASTKGPSVFPLAPSSKSTSGGTAALG |
| | PGLALA | CLVKDYFPEPVTVSWNSGALTSGVHTFPAVLQSSGLYSLSSVVTV |
| | | PSSSLGTQTYICNVNHKPSNTKVDKKVEPKSCDGGGGSGGGGSEV |
| | | QLLESGGGLVQPGGSLRLSCAASGFTFSSYAMSWVRQAPGKGLEW |
| | | VSAIIGSGASTYYADSVKGRFTISRDNSKNTLYLQMNSLRAEDTA |
| | | VYYCAKGWFGGFNYWGQGTLVTVSSASTKGPSVFPLAPSSKSTSG |
| | | GTAALGCLVEDYFPEPVTVSWNSGALTSGVHTFPAVLQSSGLYSL |
| | | SSVVTVPSSSLGTQTYICNVNHKPSNTKVDEKVEPKSCDKTHTCP |
| | | PCPAPEAAGGPSVFLFPPKPKDTLMISRTPEVTCVVVDVSHEDPE |
| | | VKFNWYVDGVEVHNAKTKPREEQYNSTYRVVSVLTVLHQDWLNGK |
| | | EYKCKVSNKALGAPIEKTISKAKGQPREPQVYTLPPCRDELTKNQ |
| | | VSLWCLVKGFYPSDIAVEWESNGQPENNYKTTPPVLDSDGSFFLY |
| | | SKLTVDKSRWQQGNVFSCSVMHEALHNHYTQKSLSLSP |
| 76 | FAP(4B9) VHCH1 | EVQLLESGGGLVQPGGSLRLSCAASGFTFSSYAMSWVRQAPGKGL |
| | “EE”- Fc hole PGLALA | EWVSAIIGSGASTYYADSVKGRFTISRDNSKNTLYLQMNSLRAED |
| | | TAVYYCAKGWFGGFNYWGQGTLVTVSSASTKGPSVFPLAPSSKST |
| | | SGGTAALGCLVEDYFPEPVTVSWNSGALTSGVHTFPAVLQSSGLY |
| | | SLSSVVTVPSSSLGTQTYICNVNHKPSNTKVDEKVEPKSCDKTHT |
| | | CPPCPAPEAAGGPSVFLFPPKPKDTLMISRTPEVTCVVVDVSHED |
| | | PEVKFNWYVDGVEVHNAKTKPREEQYNSTYRVVSVLTVLHQDWLN |
| | | GKEYKCKVSNKALGAPIEKTISKAKGQPREPQVCTLPPSRDELTK |
| | | NQVSLSCAVKGFYPSDIAVEWESNGQPENNYKTTPPVLDSDGSFF |
| | | LVSKLTVDKSRWQQGNVFSCSVMHEALHNHYTQKSLSLSP |
| 77 | CD28(SA) VHCL | QVQLVQSGAEVKKPGASVKVSCKASGYTFTSYYIHWVRQAPGQGL |
| | | EWIGCIYPGNVNTNYNEKFKDRATLTVDTSISTAYMELSRLRSDD |
| | | TAVYFCTRSHYGLDWNFDVWGQGTTVTVSSASVAAPSVFIFPPSD |
| | | EQLKSGTASVVCLLNNFYPREAKVQWKVDNALQSGNSQESVTEQD |
| | | SKDSTYSLSSTLTLSKADYEKHKVYACEVTHQGLSSPVTKSFNRG |
| | | EC |
| 78 | FAP(4B9) VLCL “RK” | EIVLTQSPGTLSLSPGERATLSCRASQSVTSSYLAWYQQKPGQAP |
| | | RLLINVGSRRATGIPDRFSGSGSGTDFTLTISRLEPEDFAVYYCQ |
| | | QGIMLPPTFGQGTKVEIKRTVAAPSVFIFPPSDRKLKSGTASVVC |
| | | LLNNFYPREAKVQWKVDNALQSGNSQESVTEQDSKDSTYSLSSTL |
| | | TLSKADYEKHKVYACEVTHQGLSSPVTKSFNRGEC |
| 79 | Fc hole PGLALA | DKTHTCPPCPAPEAAGGPSVFLFPPKPKDTLMISRTPEVTCVVVD |
| | | VSHEDPEVKFNWYVDGVEVHNAKTKPREEQYNSTYRVVSVLTVLH |
| | | QDWLNGKEYKCKVSNKALGAPIEKTISKAKGQPREPQVCTLPPSR |
| | | DELTKNQVSLSCAVKGFYPSDIAVEWESNGQPENNYKTTPPVLDS |
| | | DGSFFLVSKLTVDKSRWQQGNVFSCSVMHEALHNHYTQKSLSLSP |
| 80 | Fc knob -FAP(4B9) VH | DKTHTCPPCPAPEAAGGPSVFLFPPKPKDTLMISRTPEVTCVVVD |
| | | VSHEDPEVKFNWYVDGVEVHNAKTKPREEQYNSTYRVVSVLTVLH |
| | | QDWLNGKEYKCKVSNKALGAPIEKTISKAKGQPREPQVYTLPPCR |
| | | DELTKNQVSLWCLVKGFYPSDIAVEWESNGQPENNYKTTPPVLDS |
| | | DGSFFLYSKLTVDKSRWQQGNVFSCSVMHEALHNHYTQKSLSLSP |
| | | GGGGGSGGGGSGGGGSGGGGSEVQLLESGGGLVQPGGSLRLSCAA |
| | | SGFTFSSYAMSWVRQAPGKGLEWVSAIIGSGASTYYADSVKGRFT |
| | | ISRDNSKNTLYLQMNSLRAEDTAVYYCAKGWFGGFNYWGQGTLVT |
| | | VSS |
| 81 | CD28(SA) VHCH1 | QVQLVQSGAEVKKPGASVKVSCKASGYTFTSYYIHWVRQAPGQGL |
| | “EE”- Fc PGLALA | EWIGCIYPGNVNTNYNEKFKDRATLTVDTSISTAYMELSRLRSDD |
| | CEA VHCL | TAVYFCTRSHYGLDWNFDVWGQGTTVTVSSASTKGPSVFPLAPSS |
| | | KSTSGGTAALGCLVEDYFPEPVTVSWNSGALTSGVHTFPAVLQSS |
| | | GLYSLSSVVTVPSSSLGTQTYICNVNHKPSNTKVDEKVEPKSCDK |
| | | THTCPPCPAPEAAGGPSVFLFPPKPKDTLMISRTPEVTCVVVDVS |
| | | HEDPEVKFNWYVDGVEVHNAKTKPREEQYNSTYRVVSVLTVLHQD |
| | | WLNGKEYKCKVSNKALGAPIEKTISKAKGQPREPQVYTLPPSRDE |
| | | LTKNQVSLTCLVKGFYPSDIAVEWESNGQPENNYKTTPPVLDSDG |
| | | SFFLYSKLTVDKSRWQQGNVFSCSVMHEALHNHYTQKSLSLSPGG |
| | | GGGSGGGGSGGGGSGGGGSEVQLVESGGGLVQPGRSLRLSCAASG |
| | | FTVSSYWMHWVRQAPGKGLEWVGFIRNKANGGTTEYAASVKGRFT |
| | | ISRDDSKNTLYLQMNSLRAEDTAVYYCARDRGLRFYFDYWGQGTT |
| | | VTVSSASVAAPSVFIFPPSDEQLKSGTASVVCLLNNFYPREAKVQ |
| | | WKVDNALQSGNSQESVTEQDSKDSTYSLSSTLTLSKADYEKHKVY |
| | | ACEVTHQGLSSPVTKSFNRGEC |
| 82 | CEAVLCH1 | QAVLTQPASLSASPGASASLTCTLRRGINVGAYSIYWYQQKPGSP |
| | | PQYLLRYKSDSDKQQGSGVSSRFSASKDASANAGILLISGLQSED |
| | | EADYYCMIWHSGASAVFGGGTKLTVLSSASTKGPSVFPLAPSSKS |
| | | TSGGTAALGCLVKDYFPEPVTVSWNSGALTSGVHTFPAVLQSSGL |
| | | YSLSSVVTVPSSSLGTQTYICNVNHKPSNTKVDKKVEPKSC |
| 83 | CD28(SA) VHCH1- Fc | QVQLVQSGAEVKKPGASVKVSCKASGYTFTSYYIHWVRQAPGQGL |
| | knob CEA VH | EWIGCIYPGNVNTNYNEKFKDRATLTVDTSISTAYMELSRLRSDD |
| | | TAVYFCTRSHYGLDWNFDVWGQGTTVTVSSASTKGPSVFPLAPSS |
| | | KSTSGGTAALGCLVKDYFPEPVTVSWNSGALTSGVHTFPAVLQSS |
| | | GLYSLSSVVTVPSSSLGTQTYICNVNHKPSNTKVDKKVEPKSCDK |
| | | THTCPPCPAPEAAGGPSVFLFPPKPKDTLMISRTPEVTCVVVDVS |
| | | HEDPEVKFNWYVDGVEVHNAKTKPREEQYNSTYRVVSVLTVLHQD |
| | | WLNGKEYKCKVSNKALGAPIEKTISKAKGQPREPQVYTLPPCRDE |
| | | LTKNQVSLWCLVKGFYPSDIAVEWESNGQPENNYKTTPPVLDSDG |
| | | SFFLYSKLTVDKSRWQQGNVFSCSVMHEALHNHYTQKSLSLSPGG |
| | | GGGSGGGGSGGGGSGGGGSEVQLVESGGGLVQPGRSLRLSCAASG |
| | | FTVSSYWMHWVRQAPGKGLEWVGFIRNKANGGTTEYAASVKGRFT |
| | | ISRDDSKNTLYLQMNSLRAEDTAVYYCARDRGLRFYFDYWGQGTT |
| | | VTVSS |
| 84 | CD28(SA) VHCH1- Fc | QVQLVQSGAEVKKPGASVKVSCKASGYTFTSYYIHWVRQAPGQGL |
| | hole CEA VL | EWIGCIYPGNVNTNYNEKFKDRATLTVDTSISTAYMELSRLRSDD |
| | | TAVYFCTRSHYGLDWNFDVWGQGTTVTVSSASTKGPSVFPLAPSS |
| | | KSTSGGTAALGCLVKDYFPEPVTVSWNSGALTSGVHTFPAVLQSS |
| | | GLYSLSSVVTVPSSSLGTQTYICNVNHKPSNTKVDKKVEPKSCDK |
| | | THTCPPCPAPEAAGGPSVFLFPPKPKDTLMISRTPEVTCVVVDVS |
| | | HEDPEVKFNWYVDGVEVHNAKTKPREEQYNSTYRVVSVLTVLHQD |
| | | WLNGKEYKCKVSNKALGAPIEKTISKAKGQPREPQVCTLPPSRDE |
| | | LTKNQVSLSCAVKGFYPSDIAVEWESNGQPENNYKTTPPVLDSDG |
| | | SFFLVSKLTVDKSRWQQGNVFSCSVMHEALHNHYTQKSLSLSPGG |
| | | GGGSGGGGSGGGGSGGGGSQAVLTQPASLSASPGASASLTCTLRR |
| | | GINVGAYSIYWYQQKPGSPPQYLLRYKSDSDKQQGSGVSSRFSAS |
| | | KDASANAGILLISGLQSEDEADYYCMIWHSGASAVFGGGTKLTVL |
| 85 | CD28(SA) VHCH1 | QVQLVQSGAEVKKPGASVKVSCKASGYTFTSYYIHWVRQAPGQGL |
| | “EE”- Fc hole PGLALA | EWIGCIYPGNVNTNYNEKFKDRATLTVDTSISTAYMELSRLRSDD |
| | HYRF | TAVYFCTRSHYGLDWNFDVWGQGTTVTVSSASTKGPSVFPLAPSS |
| | | KSTSGGTAALGCLVEDYFPEPVTVSWNSGALTSGVHTFPAVLQSS |
| | | GLYSLSSVVTVPSSSLGTQTYICNVNHKPSNTKVDEKVEPKSCDK |
| | | THTCPPCPAPEAAGGPSVFLFPPKPKDTLMISRTPEVTCVVVDVS |
| | | HEDPEVKFNWYVDGVEVHNAKTKPREEQYNSTYRVVSVLTVLHQD |
| | | WLNGKEYKCKVSNKALGAPIEKTISKAKGQPREPQVCTLPPSRDE |
| | | LTKNQVSLSCAVKGFYPSDIAVEWESNGQPENNYKTTPPVLDSDG |
| | | SFELVSKLTVDKSRWQQGNVFSCSVMHEALHNRFTQKSLSLSP |
| 86 | Fc knob PGLALA | DKTHTCPPCPAPEAAGGPSVFLFPPKPKDTLMISRTPEVTCVVVD |
| | | VSHEDPEVKFNWYVDGVEVHNAKTKPREEQYNSTYRVVSVLTVLH |
| | | QDWLNGKEYKCKVSNKALGAPIEKTISKAKGQPREPQVYTLPPCR |
| | | DELTKNQVSLWCLVKGFYPSDIAVEWESNGQPENNYKTTPPVLDS |
| | | DGSFFLYSKLTVDKSRWQQGNVFSCSVMHEALHNHYTQKSLSLSP |
| 87 | CEA VL-CH1 hu IgG1 | QAVLTQPASLSASPGASASLTCTLRRGINVGAYSIYWYQQKPGSP |
| | PGLALA Fc hole | PQYLLRYKSDSDKQQGSGVSSRFSASKDASANAGILLISGLQSED |
| | | EADYYCMIWHSGASAVFGGGTKLTVLSSASTKGPSVFPLAPSSKS |
| | | TSGGTAALGCLVKDYFPEPVTVSWNSGALTSGVHTFPAVLQSSGL |
| | | YSLSSVVTVPSSSLGTQTYICNVNHKPSNTKVDKKVEPKSCDKTH |
| | | TCPPCPAPEAAGGPSVFLFPPKPKDTLMISRTPEVTCVVVDVSHE |
| | | DPEVKFNWYVDGVEVHNAKTKPREEQYNSTYRVVSVLTVLHQDWL |
| | | NGKEYKCKVSNKALGAPIEKTISKAKGQPREPQVCTLPPSRDELT |
| | | KNQVSLSCAVKGFYPSDIAVEWESNGQPENNYKTTPPVLDSDGSF |
| | | FLVSKLTVDKSRWQQGNVFSCSVMHEALHNHYTQKSLSLSP |
| 88 | CEAVH-CL | EVQLVESGGGLVQPGRSLRLSCAASGFTVSSYWMHWVRQAPGKGL |
| | | EWVGFIRNKANGGTTEYAASVKGRFTISRDDSKNTLYLQMNSLRA |
| | | EDTAVYYCARDRGLRFYFDYWGQGTTVTVSSASVAAPSVFIFPPS |
| | | DEQLKSGTASVVCLLNNFYPREAKVQWKVDNALQSGNSQESVTEQ |
| | | DSKDSTYSLSSTLTLSKADYEKHKVYACEVTHQGLSSPVTKSFNR |
| | | GEC |
| 89 | CD28(mAb 9.3) light | DIELTQSPASLAVSLGQRATISCRASESVEYYVTSLMQWYQQKPG |
| | chain | QPPKLLIFAASNVESGVPARFSGSGSGTNFSLNIHPVDEDDVAMY |
| | | FCQQSRKVPYTFGGGTKLEIKRTVAAPSVFIFPPSDEQLKSGTAS |
| | | VVCLLNNFYPREAKVQWKVDNALQSGNSQESVTEQDSKDSTYSLS |
| | | STLTLSKADYEKHKVYACEVTHQGLSSPVTKSFNRGEC |
| 90 | CD28(mAb 9.3) hu | EVKLQQSGPGLVTPSQSLSITCTVSGFSLSDYGVHWVRQSPGQGL |
| | IgG1 PGLALA heavy | EWLGVIWAGGGTNYNSALMSRKSISKDNSKSQVFLKMNSLQADDT |
| | chain | AVYYCARDKGYSYYYSMDYWGQGTSVTVSSASTKGPSVFPLAPSS |
| | | KSTSGGTAALGCLVKDYFPEPVTVSWNSGALTSGVHTFPAVLQSS |
| | | GLYSLSSVVTVPSSSLGTQTYICNVNHKPSNTKVDKKVEPKSCDK |
| | | THTCPPCPAPEAAGGPSVFLFPPKPKDTLMISRTPEVTCVVVDVS |
| | | HEDPEVKFNWYVDGVEVHNAKTKPREEQYNSTYRVVSVLTVLHQD |
| | | WLNGKEYKCKVSNKALGAPIEKTISKAKGQPREPQVYTLPPSRDE |
| | | LTKNQVSLTCLVKGFYPSDIAVEWESNGQPENNYKTTPPVLDSDG |
| | | SFFLYSKLTVDKSRWQQGNVFSCSVMHEALHNHYTQKSLSLSP |
| 91 | CD28(mAb 9.3) hu IgG | EVKLQQSGPGLVTPSQSLSITCTVSGFSLSDYGVHWVRQSPGQGL |
| | light chain “RK” | EWLGVIWAGGGTNYNSALMSRKSISKDNSKSQVFLKMNSLQADDT |
| | | AVYYCARDKGYSYYYSMDYWGQGTSVTVSSASTKGPSVFPLAPSS |
| | | KSTSGGTAALGCLVEDYFPEPVTVSWNSGALTSGVHTFPAVLQSS |
| | | GLYSLSSVVTVPSSSLGTQTYICNVNHKPSNTKVDEKVEPKSCDK |
| | | THTCPPCPAPEAAGGPSVFLFPPKPKDTLMISRTPEVTCVVVDVS |
| | | HEDPEVKFNWYVDGVEVHNAKTKPREEQYNSTYRVVSVLTVLHQD |
| | | WLNGKEYKCKVSNKALGAPIEKTISKAKGQPREPQVYTLPPCRDE |
| | | LTKNQVSLWCLVKGFYPSDIAVEWESNGQPENNYKTTPPVLDSDG |
| | | SFFLYSKLTVDKSRWQQGNVFSCSVMHEALHNHYTQKSLSLSPGK |
| 92 | CD28(mAb 9.3) hu | DIELTQSPASLAVSLGQRATISCRASESVEYYVTSLMQWYQQKPG |
| | IgG1 PGLALA Fc knob | QPPKLLIFAASNVESGVPARFSGSGSGTNFSLNIHPVDEDDVAMY |
| | “EE” | FCQQSRKVPYTFGGGTKLEIKRTVAAPSVFIFPPSDRKLKSGTAS |
| | | VVCLLNNFYPREAKVQWKVDNALQSGNSQESVTEQDSKDSTYSLS |
| | | STLTLSKADYEKHKVYACEVTHQGLSSPVTKSFNRGEC |
| 93 | CD28(mAb 9.3) | EVKLQQSGPGLVTPSQSLSITCTVSGFSLSDYGVHWVRQSPGQGL |
| | VHCH-VHCH Fc knob | EWLGVIWAGGGTNYNSALMSRKSISKDNSKSQVFLKMNSLQADDT |
| | FAP(4B9) VH | AVYYCARDKGYSYYYSMDYWGQGTSVTVSSASTKGPSVFPLAPSS |
| | PGLALA | KSTSGGTAALGCLVKDYFPEPVTVSWNSGALTSGVHTFPAVLQSS |
| | | GLYSLSSVVTVPSSSLGTQTYICNVNHKPSNTKVDKKVEPKSCDG |
| | | GGGSGGGGSEVKLQQSGPGLVTPSQSLSITCTVSGFSLSDYGVHW |
| | | VRQSPGQGLEWLGVIWAGGGTNYNSALMSRKSISKDNSKSQVFLK |
| | | MNSLQADDTAVYYCARDKGYSYYYSMDYWGQGTSVTVSSASTKGP |
| | | SVFPLAPSSKSTSGGTAALGCLVKDYFPEPVTVSWNSGALTSGVH |
| | | TFPAVLQSSGLYSLSSVVTVPSSSLGTQTYICNVNHKPSNTKVDK |
| | | KVEPKSCDKTHTCPPCPAPEAAGGPSVFLFPPKPKDTLMISRTPE |
| | | VTCVVVDVSHEDPEVKFNWYVDGVEVHNAKTKPREEQYNSTYRVV |
| | | SVLTVLHQDWLNGKEYKCKVSNKALGAPIEKTISKAKGQPREPQV |
| | | YTLPPCRDELTKNQVSLWCLVKGFYPSDIAVEWESNGQPENNYKT |
| | | TPPVLDSDGSFFLYSKLTVDKSRWQQGNVFSCSVMHEALHNHYTQ |
| | | KSLSLSPGGGGGSGGGGSGGGGSGGGGSEVQLLESGGGLVQPGGS |
| | | LRLSCAASGFTFSSYAMSWVRQAPGKGLEWVSAIIGSGASTYYAD |
| | | SVKGRFTISRDNSKNTLYLQMNSLRAEDTAVYYCAKGWFGGFNYW |
| | | GQGTLVTVSS |
| 94 | CD28(mAb 9.3) | EVKLQQSGPGLVTPSQSLSITCTVSGFSLSDYGVHWVRQSPGQGL |
| | VHCH-VHCH Fc hole | EWLGVIWAGGGTNYNSALMSRKSISKDNSKSQVFLKMNSLQADDT |
| | FAP(4B9) VL | AVYYCARDKGYSYYYSMDYWGQGTSVTVSSASTKGPSVFPLAPSS |
| | PGLALA | KSTSGGTAALGCLVKDYFPEPVTVSWNSGALTSGVHTFPAVLQSS |
| | | GLYSLSSVVTVPSSSLGTQTYICNVNHKPSNTKVDKKVEPKSCDG |
| | | GGGSGGGGSEVKLQQSGPGLVTPSQSLSITCTVSGFSLSDYGVHW |
| | | VRQSPGQGLEWLGVIWAGGGTNYNSALMSRKSISKDNSKSQVFLK |
| | | MNSLQADDTAVYYCARDKGYSYYYSMDYWGQGTSVTVSSASTKGP |
| | | SVFPLAPSSKSTSGGTAALGCLVKDYFPEPVTVSWNSGALTSGVH |
| | | TFPAVLQSSGLYSLSSVVTVPSSSLGTQTYICNVNHKPSNTKVDK |
| | | KVEPKSCDKTHTCPPCPAPEAAGGPSVFLFPPKPKDTLMISRTPE |
| | | VTCVVVDVSHEDPEVKFNWYVDGVEVHNAKTKPREEQYNSTYRVV |
| | | SVLTVLHQDWLNGKEYKCKVSNKALGAPIEKTISKAKGQPREPQV |
| | | CTLPPSRDELTKNQVSLSCAVKGFYPSDIAVEWESNGQPENNYKT |
| | | TPPVLDSDGSFFLVSKLTVDKSRWQQGNVFSCSVMHEALHNHYTQ |
| | | KSLSLSPGGGGGSGGGGSGGGGSGGGGSEIVLTQSPGTLSLSPGE |
| | | RATLSCRASQSVTSSYLAWYQQKPGQAPRLLINVGSRRATGIPDR |
| | | FSGSGSGTDFTLTISRLEPEDFAVYYCQQGIMLPPTFGQGTKVEI |
| | | K |
| 95 | CD28(mAb 9.3) | EVKLQQSGPGLVTPSQSLSITCTVSGFSLSDYGVHWVRQSPGQGL |
| | VHCH- Fc knob | EWLGVIWAGGGTNYNSALMSRKSISKDNSKSQVFLKMNSLQADDT |
| | FAP(4B9) VH | AVYYCARDKGYSYYYSMDYWGQGTSVTVSSASTKGPSVFPLAPSS |
| | | KSTSGGTAALGCLVKDYFPEPVTVSWNSGALTSGVHTFPAVLQSS |
| | | GLYSLSSVVTVPSSSLGTQTYICNVNHKPSNTKVDKKVEPKSCDK |
| | | THTCPPCPAPEAAGGPSVFLFPPKPKDTLMISRTPEVTCVVVDVS |
| | | HEDPEVKFNWYVDGVEVHNAKTKPREEQYNSTYRVVSVLTVLHQD |
| | | WLNGKEYKCKVSNKALGAPIEKTISKAKGQPREPQVYTLPPCRDE |
| | | LTKNQVSLWCLVKGFYPSDIAVEWESNGQPENNYKTTPPVLDSDG |
| | | SFFLYSKLTVDKSRWQQGNVFSCSVMHEALHNHYTQKSLSLSPGG |
| | | GGGSGGGGSGGGGSGGGGSEVQLLESGGGLVQPGGSLRLSCAASG |
| | | FTFSSYAMSWVRQAPGKGLEWVSAIIGSGASTYYADSVKGRFTIS |
| | | RDNSKNTLYLQMNSLRAEDTAVYYCAKGWFGGFNYWGQGTLVTVS |
| | | S |
| 96 | CD28(mAb 9.3) | EVKLQQSGPGLVTPSQSLSITCTVSGFSLSDYGVHWVRQSPGQGL |
| | VHCH- Fc hole | EWLGVIWAGGGTNYNSALMSRKSISKDNSKSQVFLKMNSLQADDT |
| | FAP(4B9) VL | AVYYCARDKGYSYYYSMDYWGQGTSVTVSSASTKGPSVFPLAPSS |
| | | KSTSGGTAALGCLVKDYFPEPVTVSWNSGALTSGVHTFPAVLQSS |
| | | GLYSLSSVVTVPSSSLGTQTYICNVNHKPSNTKVDKKVEPKSCDK |
| | | THTCPPCPAPEAAGGPSVFLFPPKPKDTLMISRTPEVTCVVVDVS |
| | | HEDPEVKFNWYVDGVEVHNAKTKPREEQYNSTYRVVSVLTVLHQD |
| | | WLNGKEYKCKVSNKALGAPIEKTISKAKGQPREPQVCTLPPSRDE |
| | | LTKNQVSLSCAVKGFYPSDIAVEWESNGQPENNYKTTPPVLDSDG |
| | | SFELVSKLTVDKSRWQQGNVFSCSVMHEALHNHYTQKSLSLSPGG |
| | | GGGSGGGGSGGGGSGGGGSEIVLTQSPGTLSLSPGERATLSCRAS |
| | | QSVTSSYLAWYQQKPGQAPRLLINVGSRRATGIPDRFSGSGSGTD |
| | | FTLTISRLEPEDFAVYYCQQGIMLPPTFGQGTKVEIK |
| 97 | CD28(mAb 9.3) VHCH | EVKLQQSGPGLVTPSQSLSITCTVSGFSLSDYGVHWVRQSPGQGL |
| | “EE”- Fc PGLALA | EWLGVIWAGGGTNYNSALMSRKSISKDNSKSQVFLKMNSLQADDT |
| | FAP(4B9) VHCL | AVYYCARDKGYSYYYSMDYWGQGTSVTVSSASTKGPSVFPLAPSS |
| | | KSTSGGTAALGCLVEDYFPEPVTVSWNSGALTSGVHTFPAVLQSS |
| | | GLYSLSSVVTVPSSSLGTQTYICNVNHKPSNTKVDEKVEPKSCDK |
| | | THTCPPCPAPEAAGGPSVFLFPPKPKDTLMISRTPEVTCVVVDVS |
| | | HEDPEVKFNWYVDGVEVHNAKTKPREEQYNSTYRVVSVLTVLHQD |
| | | WLNGKEYKCKVSNKALGAPIEKTISKAKGQPREPQVYTLPPSRDE |
| | | LTKNQVSLTCLVKGFYPSDIAVEWESNGQPENNYKTTPPVLDSDG |
| | | SFFLYSKLTVDKSRWQQGNVFSCSVMHEALHNHYTQKSLSLSPGG |
| | | GGGSGGGGSGGGGSGGGGSEVQLLESGGGLVQPGGSLRLSCAASG |
| | | FTFSSYAMSWVRQAPGKGLEWVSAIIGSGASTYYADSVKGRFTIS |
| | | RDNSKNTLYLQMNSLRAEDTAVYYCAKGWFGGFNYWGQGTLVTVS |
| | | SASVAAPSVFIFPPSDEQLKSGTASVVCLLNNFYPREAKVQWKVD |
| | | NALQSGNSQESVTEQDSKDSTYSLSSTLTLSKADYEKHKVYACEV |
| | | THQGLSSPVTKSFNRGEC |
| 98 | CD28(mAb 9.3) VLCL | DIELTQSPASLAVSLGQRATISCRASESVEYYVTSLMQWYQQKPG |
| | “RK” | QPPKLLIFAASNVESGVPARFSGSGSGTNFSLNIHPVDEDDVAMY |
| | | FCQQSRKVPYTFGGGTKLEIKRTVAAPSVFIFPPSDRKLKSGTAS |
| | | VVCLLNNFYPREAKVQWKVDNALQSGNSQESVTEQDSKDSTYSLS |
| | | STLTLSKADYEKHKVYACEVTHQGLSSPVTKSFNRGEC |
| 99 | FAP(4B9) VLCH1 | EIVLTQSPGTLSLSPGERATLSCRASQSVTSSYLAWYQQKPGQAP |
| | | RLLINVGSRRATGIPDRFSGSGSGTDFTLTISRLEPEDFAVYYCQ |
| | | QGIMLPPTFGQGTKVEIKSSASTKGPSVFPLAPSSKSTSGGTAAL |
| | | GCLVKDYFPEPVTVSWNSGALTSGVHTFPAVLQSSGLYSLSSVVT |
| | | VPSSSLGTQTYICNVNHKPSNTKVDKKVEPKSC |
| 100 | CD28(mAb 9.3) | DIELTQSPASLAVSLGQRATISCRASESVEYYVTSLMQWYQQKPG |
| | VLCH1- FAP(4B9) | QPPKLLIFAASNVESGVPARFSGSGSGTNFSLNIHPVDEDDVAMY |
| | VHCH1 “EE”- Fc knob | FCQQSRKVPYTFGGGTKLEIKSSASTKGPSVFPLAPSSKSTSGGT |
| | PGLALA | AALGCLVKDYFPEPVTVSWNSGALTSGVHTFPAVLQSSGLYSLSS |
| | | VVTVPSSSLGTQTYICNVNHKPSNTKVDKKVEPKSCDGGGGSGGG |
| | | GSEVQLLESGGGLVQPGGSLRLSCAASGFTFSSYAMSWVRQAPGK |
| | | GLEWVSAIIGSGASTYYADSVKGRFTISRDNSKNTLYLQMNSLRA |
| | | EDTAVYYCAKGWFGGFNYWGQGTLVTVSSASTKGPSVFPLAPSSK |
| | | STSGGTAALGCLVEDYFPEPVTVSWNSGALTSGVHTFPAVLQSSG |
| | | LYSLSSVVTVPSSSLGTQTYICNVNHKPSNTKVDEKVEPKSCDKT |
| | | HTCPPCPAPEAAGGPSVFLFPPKPKDTLMISRTPEVTCVVVDVSH |
| | | EDPEVKFNWYVDGVEVHNAKTKPREEQYNSTYRVVSVLTVLHQDW |
| | | LNGKEYKCKVSNKALGAPIEKTISKAKGQPREPQVYTLPPCRDEL |
| | | TKNQVSLWCLVKGFYPSDIAVEWESNGQPENNYKTTPPVLDSDGS |
| | | FFLYSKLTVDKSRWQQGNVFSCSVMHEALHNHYTQKSLSLSP |
| 101 | CD28(mAb 9.3) VHCL | EVKLQQSGPGLVTPSQSLSITCTVSGFSLSDYGVHWVRQSPGQGL |
| | | EWLGVIWAGGGTNYNSALMSRKSISKDNSKSQVFLKMNSLQADDT |
| | | AVYYCARDKGYSYYYSMDYWGQGTSVTVSSASVAAPSVFIFPPSD |
| | | EQLKSGTASVVCLLNNFYPREAKVQWKVDNALQSGNSQESVTEQD |
| | | SKDSTYSLSSTLTLSKADYEKHKVYACEVTHQGLSSPVTKSFNRG |
| | | EC |
| 102 | CD28(mAb 9.3) | EVKLQQSGPGLVTPSQSLSITCTVSGFSLSDYGVHWVRQSPGQGL |
| | VHCH1 “EE”- Fc | EWLGVIWAGGGTNYNSALMSRKSISKDNSKSQVFLKMNSLQADDT |
| | PGLALA CEA VHCL | AVYYCARDKGYSYYYSMDYWGQGTSVTVSSASTKGPSVFPLAPSS |
| | | KSTSGGTAALGCLVEDYFPEPVTVSWNSGALTSGVHTFPAVLQSS |
| | | GLYSLSSVVTVPSSSLGTQTYICNVNHKPSNTKVDEKVEPKSCDK |
| | | THTCPPCPAPEAAGGPSVFLFPPKPKDTLMISRTPEVTCVVVDVS |
| | | HEDPEVKFNWYVDGVEVHNAKTKPREEQYNSTYRVVSVLTVLHQD |
| | | WLNGKEYKCKVSNKALGAPIEKTISKAKGQPREPQVYTLPPSRDE |
| | | LTKNQVSLTCLVKGFYPSDIAVEWESNGQPENNYKTTPPVLDSDG |
| | | SFFLYSKLTVDKSRWQQGNVFSCSVMHEALHNHYTQKSLSLSPGG |
| | | GGGSGGGGSGGGGSGGGGSEVQLVESGGGLVQPGRSLRLSCAASG |
| | | FTVSSYWMHWVRQAPGKGLEWVGFIRNKANGGTTEYAASVKGRFT |
| | | ISRDDSKNTLYLQMNSLRAEDTAVYYCARDRGLRFYFDYWGQGTT |
| | | VTVSSASVAAPSVFIFPPSDEQLKSGTASVVCLLNNFYPREAKVQ |
| | | WKVDNALQSGNSQESVTEQDSKDSTYSLSSTLTLSKADYEKHKVY |
| | | ACEVTHQGLSSPVTKSFNRGEC |
| 103 | CD28(mAb 9.3) | EVKLQQSGPGLVTPSQSLSITCTVSGFSLSDYGVHWVRQSPGQGL |
| | VHCH1- Fc knob CEA | EWLGVIWAGGGTNYNSALMSRKSISKDNSKSQVFLKMNSLQADDT |
| | VH | AVYYCARDKGYSYYYSMDYWGQGTSVTVSSASTKGPSVFPLAPSS |
| | | KSTSGGTAALGCLVKDYFPEPVTVSWNSGALTSGVHTFPAVLQSS |
| | | GLYSLSSVVTVPSSSLGTQTYICNVNHKPSNTKVDKKVEPKSCDK |
| | | THTCPPCPAPEAAGGPSVFLFPPKPKDTLMISRTPEVTCVVVDVS |
| | | HEDPEVKFNWYVDGVEVHNAKTKPREEQYNSTYRVVSVLTVLHQD |
| | | WLNGKEYKCKVSNKALGAPIEKTISKAKGQPREPQVYTLPPCRDE |
| | | LTKNQVSLWCLVKGFYPSDIAVEWESNGQPENNYKTTPPVLDSDG |
| | | SFFLYSKLTVDKSRWQQGNVFSCSVMHEALHNHYTQKSLSLSPGG |
| | | GGGSGGGGSGGGGSGGGGSEVQLVESGGGLVQPGRSLRLSCAASG |
| | | FTVSSYWMHWVRQAPGKGLEWVGFIRNKANGGTTEYAASVKGRFT |
| | | ISRDDSKNTLYLQMNSLRAEDTAVYYCARDRGLRFYFDYWGQGTT |
| | | VTVSS |
| 104 | CD28(mAb 9.3) | EVKLQQSGPGLVTPSQSLSITCTVSGFSLSDYGVHWVRQSPGQGL |
| | VHCH1- Fc hole CEA | EWLGVIWAGGGTNYNSALMSRKSISKDNSKSQVFLKMNSLQADDT |
| | VL | AVYYCARDKGYSYYYSMDYWGQGTSVTVSSASTKGPSVFPLAPSS |
| | | KSTSGGTAALGCLVKDYFPEPVTVSWNSGALTSGVHTFPAVLQSS |
| | | GLYSLSSVVTVPSSSLGTQTYICNVNHKPSNTKVDKKVEPKSCDK |
| | | THTCPPCPAPEAAGGPSVFLFPPKPKDTLMISRTPEVTCVVVDVS |
| | | HEDPEVKFNWYVDGVEVHNAKTKPREEQYNSTYRVVSVLTVLHQD |
| | | WLNGKEYKCKVSNKALGAPIEKTISKAKGQPREPQVCTLPPSRDE |
| | | LTKNQVSLSCAVKGFYPSDIAVEWESNGQPENNYKTTPPVLDSDG |
| | | SFFLVSKLTVDKSRWQQGNVFSCSVMHEALHNHYTQKSLSLSPGG |
| | | GGGSGGGGSGGGGSGGGGSQAVLTQPASLSASPGASASLTCTLRR |
| | | GINVGAYSIYWYQQKPGSPPQYLLRYKSDSDKQQGSGVSSRFSAS |
| | | KDASANAGILLISGLQSEDEADYYCMIWHSGASAVFGGGTKLTVL |
| 105 | CD28(mAb 9.3) | EVKLQQSGPGLVTPSQSLSITCTVSGFSLSDYGVHWVRQSPGQGL |
| | VHCH1 “EE”- Fc hole | EWLGVIWAGGGTNYNSALMSRKSISKDNSKSQVFLKMNSLQADDT |
| | PGLALA HYRF | AVYYCARDKGYSYYYSMDYWGQGTSVTVSSASTKGPSVFPLAPSS |
| | | KSTSGGTAALGCLVEDYFPEPVTVSWNSGALTSGVHTFPAVLQSS |
| | | GLYSLSSVVTVPSSSLGTQTYICNVNHKPSNTKVDEKVEPKSCDK |
| | | THTCPPCPAPEAAGGPSVFLFPPKPKDTLMISRTPEVTCVVVDVS |
| | | HEDPEVKFNWYVDGVEVHNAKTKPREEQYNSTYRVVSVLTVLHQD |
| | | WLNGKEYKCKVSNKALGAPIEKTISKAKGQPREPQVCTLPPSRDE |
| | | LTKNQVSLSCAVKGFYPSDIAVEWESNGQPENNYKTTPPVLDSDG |
| | | SFFLVSKLTVDKSRWQQGNVFSCSVMHEALHNHYTQKSLSLSP |
| 106 | CD28(mAb 9.3) VLCL | DIELTQSPASLAVSLGQRATISCRASESVEYYVTSLMQWYQQKPG |
| | “RK” | QPPKLLIFAASNVESGVPARFSGSGSGTNFSLNIHPVDEDDVAMY |
| | | FCQQSRKVPYTFGGGTKLEIKRTVAAPSVFIFPPSDRKLKSGTAS |
| | | VVCLLNNFYPREAKVQWKVDNALQSGNSQESVTEQDSKDSTYSLS |
| | | STLTLSKADYEKHKVYACEVTHQGLSSPVTKSFNRGEC |
| 107 | CD28(SA) VHCH1 | QVQLVQSGAEVKKPGASVKVSCKASGYTFTSYYIHWVRQAPGQGL |
| | “EE” Fc hole PGLALA | EWIGCIYPGNVNTNYNEKFKDRATLTVDTSISTAYMELSRLRSDD |
| | FAP(4B9) VH - | TAVYFCTRSHYGLDWNFDVWGQGTTVTVSSASTKGPSVFPLAPSS |
| | CEA(Medi-565) VHCL | KSTSGGTAALGCLVEDYFPEPVTVSWNSGALTSGVHTFPAVLQSS |
| | | GLYSLSSVVTVPSSSLGTQTYICNVNHKPSNTKVDEKVEPKSCDK |
| | | THTCPPCPAPEAAGGPSVFLFPPKPKDTLMISRTPEVTCVVVDVS |
| | | HEDPEVKFNWYVDGVEVHNAKTKPREEQYNSTYRVVSVLTVLHQD |
| | | WLNGKEYKCKVSNKALGAPIEKTISKAKGQPREPQVYTLPPCRDE |
| | | LTKNQVSLWCLVKGFYPSDIAVEWESNGQPENNYKTTPPVLDSDG |
| | | SFFLYSKLTVDKSRWQQGNVFSCSVMHEALHNHYTQKSLSLSPGG |
| | | GGGSGGGGSGGGGSGGGGSEVQLLESGGGLVQPGGSLRLSCAASG |
| | | FTFSSYAMSWVRQAPGKGLEWVSAIIGSGASTYYADSVKGRFTIS |
| | | RDNSKNTLYLQMNSLRAEDTAVYYCAKGWFGGFNYWGQGTLVTVS |
| | | SGGGGSGGGGSGGGGSGGGGSEVQLVESGGGLVQPGRSLRLSCAA |
| | | SGFTVSSYWMHWVRQAPGKGLEWVGFIRNKANGGTTEYAASVKGR |
| | | FTISRDDSKNTLYLQMNSLRAEDTAVYYCARDRGLRFYFDYWGQG |
| | | TTVTVSSASVAAPSVFIFPPSDEQLKSGTASVVCLLNNFYPREAK |
| | | VQWKVDNALQSGNSQESVTEQDSKDSTYSLSSTLTLSKADYEKHK |
| | | VYACEVTHQGLSSPVTKSFNRGEC |
| 108 | CD28(SA) VHCH1 | QVQLVQSGAEVKKPGASVKVSCKASGYTFTSYYIHWVRQAPGQGL |
| | “EE” Fc knob PGLALA | EWIGCIYPGNVNTNYNEKFKDRATLTVDTSISTAYMELSRLRSDD |
| | FAP(4B9) VL | TAVYFCTRSHYGLDWNFDVWGQGTTVTVSSASTKGPSVFPLAPSS |
| | | KSTSGGTAALGCLVEDYFPEPVTVSWNSGALTSGVHTFPAVLQSS |
| | | GLYSLSSVVTVPSSSLGTQTYICNVNHKPSNTKVDEKVEPKSCDK |
| | | THTCPPCPAPEAAGGPSVFLFPPKPKDTLMISRTPEVTCVVVDVS |
| | | HEDPEVKFNWYVDGVEVHNAKTKPREEQYNSTYRVVSVLTVLHQD |
| | | WLNGKEYKCKVSNKALGAPIEKTISKAKGQPREPQVCTLPPSRDE |
| | | LTKNQVSLSCAVKGFYPSDIAVEWESNGQPENNYKTTPPVLDSDG |
| | | SFFLVSKLTVDKSRWQQGNVFSCSVMHEALHNHYTQKSLSLSPGG |
| | | GGGSGGGGSGGGGSGGGGSEIVLTQSPGTLSLSPGERATLSCRAS |
| | | QSVTSSYLAWYQQKPGQAPRLLINVGSRRATGIPDRFSGSGSGTD |
| | | FTLTISRLEPEDFAVYYCQQGIMLPPTFGQGTKVEIK |
| 109 | CEA VLCH1 | QAVLTQPASLSASPGASASLTCTLRRGINVGAYSIYWYQQKPGSP |
| | | PQYLLRYKSDSDKQQGSGVSSRFSASKDASANAGILLISGLQSED |
| | | EADYYCMIWHSGASAVFGGGTKLTVLSSASTKGPSVFPLAPSSKS |
| | | TSGGTAALGCLVKDYFPEPVTVSWNSGALTSGVHTFPAVLQSSGL |
| | | YSLSSVVTVPSSSLGTQTYICNVNHKPSNTKVDKKVEPKSC |
| 110 | CD28(SA) VHCH1 Fc | QVQLVQSGAEVKKPGASVKVSCKASGYTFTSYYIHWVRQAPGQGL |
| | hole PGLALA | EWIGCIYPGNVNTNYNEKFKDRATLTVDTSISTAYMELSRLRSDD |
| | FAP(4B9) VH - CEA | TAVYFCTRSHYGLDWNFDVWGQGTTVTVSSASTKGPSVFPLAPSS |
| | VH | KSTSGGTAALGCLVKDYFPEPVTVSWNSGALTSGVHTFPAVLQSS |
| | | GLYSLSSVVTVPSSSLGTQTYICNVNHKPSNTKVDKKVEPKSCDK |
| | | THTCPPCPAPEAAGGPSVFLFPPKPKDTLMISRTPEVTCVVVDVS |
| | | HEDPEVKFNWYVDGVEVHNAKTKPREEQYNSTYRVVSVLTVLHQD |
| | | WLNGKEYKCKVSNKALGAPIEKTISKAKGQPREPQVYTLPPCRDE |
| | | LTKNQVSLWCLVKGFYPSDIAVEWESNGQPENNYKTTPPVLDSDG |
| | | SFFLYSKLTVDKSRWQQGNVFSCSVMHEALHNHYTQKSLSLSPGG |
| | | GGGSGGGGSGGGGSGGGGSEVQLLESGGGLVQPGGSLRLSCAASG |
| | | FTFSSYAMSWVRQAPGKGLEWVSAIIGSGASTYYADSVKGRFTIS |
| | | RDNSKNTLYLQMNSLRAEDTAVYYCAKGWFGGFNYWGQGTLVTVS |
| | | SGGGGSGGGGSGGGGSGGGGSEVQLVESGGGLVQPGRSLRLSCAA |
| | | SGFTVSSYWMHWVRQAPGKGLEWVGFIRNKANGGTTEYAASVKGR |
| | | FTISRDDSKNTLYLQMNSLRAEDTAVYYCARDRGLRFYFDYWGQG |
| | | TTVTVSS |
| 111 | CD28(SA) VHCH1 Fc | QVQLVQSGAEVKKPGASVKVSCKASGYTFTSYYIHWVRQAPGQGL |
| | knob PGLALA | EWIGCIYPGNVNTNYNEKFKDRATLTVDTSISTAYMELSRLRSDD |
| | FAP(4B9) VL- CEA | TAVYFCTRSHYGLDWNFDVWGQGTTVTVSSASTKGPSVFPLAPSS |
| | VL | KSTSGGTAALGCLVKDYFPEPVTVSWNSGALTSGVHTFPAVLQSS |
| | | GLYSLSSVVTVPSSSLGTQTYICNVNHKPSNTKVDKKVEPKSCDK |
| | | THTCPPCPAPEAAGGPSVFLFPPKPKDTLMISRTPEVTCVVVDVS |
| | | HEDPEVKFNWYVDGVEVHNAKTKPREEQYNSTYRVVSVLTVLHQD |
| | | WLNGKEYKCKVSNKALGAPIEKTISKAKGQPREPQVCTLPPSRDE |
| | | LTKNQVSLSCAVKGFYPSDIAVEWESNGQPENNYKTTPPVLDSDG |
| | | SFFLVSKLTVDKSRWQQGNVFSCSVMHEALHNHYTQKSLSLSPGG |
| | | GGGSGGGGSGGGGSGGGGSEIVLTQSPGTLSLSPGERATLSCRAS |
| | | QSVTSSYLAWYQQKPGQAPRLLINVGSRRATGIPDRFSGSGSGTD |
| | | FTLTISRLEPEDFAVYYCQQGIMLPPTFGQGTKVEIKGGGGSGGG |
| | | GSGGGGSGGGGSQAVLTQPASLSASPGASASLTCTLRRGINVGAY |
| | | SIYWYQQKPGSPPQYLLRYKSDSDKQQGSGVSSRFSASKDASANA |
| | | GILLISGLQSEDEADYYCMIWHSGASAVFGGGTKLTVL |
| 112 | VH (CD28 SA) CH1 | QVQLVQSGAEVKKPGASVKVSCKASGYTFTSYYIHWVRQAPGQGL |
| | (EE)- Fc knob | EWIGCIYPGNVNTNYNEKFKDRATLTVDTSISTAYMELSRLRSDD |
| | PGLALA | TAVYFCTRSHYGLDWNFDVWGQGTTVTVSSASTKGPSVFPLAPSS |
| | | KSTSGGTAALGCLVEDYFPEPVTVSWNSGALTSGVHTFPAVLQSS |
| | | GLYSLSSVVTVPSSSLGTQTYICNVNHKPSNTKVDEKVEPKSCDK |
| | | THTCPPCPAPEAAGGPSVFLFPPKPKDTLMISRTPEVTCVVVDVS |
| | | HEDPEVKFNWYVDGVEVHNAKTKPREEQYNSTYRVVSVLTVLHQD |
| | | WLNGKEYKCKVSNKALGAPIEKTISKAKGQPREPQVYTLPPCRDE |
| | | LTKNQVSLWCLVKGFYPSDIAVEWESNGQPENNYKTTPPVLDSDG |
| | | SFFLYSKLTVDKSRWQQGNVFSCSVMHEALHNHYTQKSLSLSP |
| 113 | VH (CD28 variant g) | QVQLVQSGAEVKKPGASVKVSCKASGYTFTSYYIHWVRQAPGQGL |
| | CH1 (EE) - Fc knob | EWIGSIYPRNVQTNYNEKFKDRATLTVDTSISTAYMELSRLRSDD |
| | PGLALA | TAVYFCTRSHYGLDHNFDVWGQGTTVTVSSASTKGPSVFPLAPSS |
| | | KSTSGGTAALGCLVEDYFPEPVTVSWNSGALTSGVHTFPAVLQSS |
| | | GLYSLSSVVTVPSSSLGTQTYICNVNHKPSNTKVDEKVEPKSCDK |
| | | THTCPPCPAPEAAGGPSVFLFPPKPKDTLMISRTPEVTCVVVDVS |
| | | HEDPEVKFNWYVDGVEVHNAKTKPREEQYNSTYRVVSVLTVLHQD |
| | | WLNGKEYKCKVSNKALGAPIEKTISKAKGQPREPQVYTLPPCRDE |
| | | LTKNQVSLWCLVKGFYPSDIAVEWESNGQPENNYKTTPPVLDSDG |
| | | SFFLYSKLTVDKSRWQQGNVFSCSVMHEALHNHYTQKSLSLSP |
| 114 | VH (CD28 variant f) | QVQLVQSGAEVKKPGASVKVSCKASGYTFTSYYIHWVRQAPGQGL |
| | CH1 (EE) - Fc knob | EWIGSIYPGNVQTNYNEKFKDRATLTVDTSISTAYMELSRLRSDD |
| | PGLALA | TAVYFCTRSHYGLDFNFDVWGQGTTVTVSSASTKGPSVFPLAPSS |
| | | KSTSGGTAALGCLVEDYFPEPVTVSWNSGALTSGVHTFPAVLQSS |
| | | GLYSLSSVVTVPSSSLGTQTYICNVNHKPSNTKVDEKVEPKSCDK |
| | | THTCPPCPAPEAAGGPSVFLFPPKPKDTLMISRTPEVTCVVVDVS |
| | | HEDPEVKFNWYVDGVEVHNAKTKPREEQYNSTYRVVSVLTVLHQD |
| | | WLNGKEYKCKVSNKALGAPIEKTISKAKGQPREPQVYTLPPCRDE |
| | | LTKNQVSLWCLVKGFYPSDIAVEWESNGQPENNYKTTPPVLDSDG |
| | | SFFLYSKLTVDKSRWQQGNVFSCSVMHEALHNHYTQKSLSLSP |
| 115 | VH (CD28 variant j) | EVQLVESGGGLVQPGGSLRLSCAASGFTFTSYYIHWVRQAPGKGL |
| | CH1 (EE) - Fc knob | EWVASIYPGNVATRYADSVKGRFTISADTSKNTAYLQMNSLRAED |
| | PGLALA | TAVYYCTRSHYGLDWNFDVWGQGTTVTVSSASTKGPSVFPLAPSS |
| | | KSTSGGTAALGCLVEDYFPEPVTVSWNSGALTSGVHTFPAVLQSS |
| | | GLYSLSSVVTVPSSSLGTQTYICNVNHKPSNTKVDEKVEPKSCDK |
| | | THTCPPCPAPEAAGGPSVFLFPPKPKDTLMISRTPEVTCVVVDVS |
| | | HEDPEVKFNWYVDGVEVHNAKTKPREEQYNSTYRVVSVLTVLHQD |
| | | WLNGKEYKCKVSNKALGAPIEKTISKAKGQPREPQVYTLPPCRDE |
| | | LTKNQVSLWCLVKGFYPSDIAVEWESNGQPENNYKTTPPVLDSDG |
| | | SFFLYSKLTVDKSRWQQGNVFSCSVMHEALHNHYTQKSLSLSP |
| 116 | VH (CD28 variant e) | QVQLVQSGAEVKKPGASVKVSCKASGYTFTSYYIHWVRQAPGQGL |
| | CH1 (EE)- Fc knob | EWIGSIYPGNVQTNYNEKFKDRATLTVDTSISTAYMELSRLRSDD |
| | PGLALA | TAVYFCTRSHYGLDWNFDVWGQGTTVTVSSASTKGPSVFPLAPSS |
| | | KSTSGGTAALGCLVEDYFPEPVTVSWNSGALTSGVHTFPAVLQSS |
| | | GLYSLSSVVTVPSSSLGTQTYICNVNHKPSNTKVDEKVEPKSCDK |
| | | THTCPPCPAPEAAGGPSVFLFPPKPKDTLMISRTPEVTCVVVDVS |
| | | HEDPEVKFNWYVDGVEVHNAKTKPREEQYNSTYRVVSVLTVLHQD |
| | | WLNGKEYKCKVSNKALGAPIEKTISKAKGQPREPQVYTLPPCRDE |
| | | LTKNQVSLWCLVKGFYPSDIAVEWESNGQPENNYKTTPPVLDSDG |
| | | SFFLYSKLTVDKSRWQQGNVFSCSVMHEALHNHYTQKSLSLSP |
| 117 | VH (CD28 variant b) | QVQLVQSGAEVKKPGASVKVSCKASGYTFTSYYIHWVRQAPGQGL |
| | CH1 (EE) - Fc knob | EWIGSIYPGNVQTNYNEKFKDRATLTVDTSISTAYMELSRLRSDD |
| | PGLALA | TAVYFCTRSHYGLDHNFDVWGQGTTVTVSSASTKGPSVFPLAPSS |
| | | KSTSGGTAALGCLVEDYFPEPVTVSWNSGALTSGVHTFPAVLQSS |
| | | GLYSLSSVVTVPSSSLGTQTYICNVNHKPSNTKVDEKVEPKSCDK |
| | | THTCPPCPAPEAAGGPSVFLFPPKPKDTLMISRTPEVTCVVVDVS |
| | | HEDPEVKFNWYVDGVEVHNAKTKPREEQYNSTYRVVSVLTVLHQD |
| | | WLNGKEYKCKVSNKALGAPIEKTISKAKGQPREPQVYTLPPCRDE |
| | | LTKNQVSLWCLVKGFYPSDIAVEWESNGQPENNYKTTPPVLDSDG |
| | | SFFLYSKLTVDKSRWQQGNVFSCSVMHEALHNHYTQKSLSLSP |
| 118 | VH (CD28 variant a) | QVQLVQSGAEVKKPGASVKVSCKASGYTFTSYYIHWVRQAPGQGL |
| | CH1 (EE) - Fc knob | EWIGSIYPGNVNTNYNEKFKDRATLTVDTSISTAYMELSRLRSDD |
| | PGLALA | TAVYFCTRSHYGLDWNFDVWGQGTTVTVSSASTKGPSVFPLAPSS |
| | | KSTSGGTAALGCLVEDYFPEPVTVSWNSGALTSGVHTFPAVLQSS |
| | | GLYSLSSVVTVPSSSLGTQTYICNVNHKPSNTKVDEKVEPKSCDK |
| | | THTCPPCPAPEAAGGPSVFLFPPKPKDTLMISRTPEVTCVVVDVS |
| | | HEDPEVKFNWYVDGVEVHNAKTKPREEQYNSTYRVVSVLTVLHQD |
| | | WLNGKEYKCKVSNKALGAPIEKTISKAKGQPREPQVYTLPPCRDE |
| | | LTKNQVSLWCLVKGFYPSDIAVEWESNGQPENNYKTTPPVLDSDG |
| | | SFFLYSKLTVDKSRWQQGNVFSCSVMHEALHNHYTQKSLSLSP |
| 119 | VH (CD28 variant i) | EVQLVESGGGLVQPGGSLRLSCAASGFTFTSYYIHWVRQAPGKGL |
| | CH1 (EE) - Fc knob | EWVASIYPGNVNTRYADSVKGRFTISADTSKNTAYLQMNSLRAED |
| | PGLALA | TAVYYCTRSHYGLDWNFDVWGQGTTVTVSSASTKGPSVFPLAPSS |
| | | KSTSGGTAALGCLVEDYFPEPVTVSWNSGALTSGVHTFPAVLQSS |
| | | GLYSLSSVVTVPSSSLGTQTYICNVNHKPSNTKVDEKVEPKSCDK |
| | | THTCPPCPAPEAAGGPSVFLFPPKPKDTLMISRTPEVTCVVVDVS |
| | | HEDPEVKFNWYVDGVEVHNAKTKPREEQYNSTYRVVSVLTVLHQD |
| | | WLNGKEYKCKVSNKALGAPIEKTISKAKGQPREPQVYTLPPCRDE |
| | | LTKNQVSLWCLVKGFYPSDIAVEWESNGQPENNYKTTPPVLDSDG |
| | | SFFLYSKLTVDKSRWQQGNVFSCSVMHEALHNHYTQKSLSLSP |
| 120 | VL (CD28 variant k)- | DIQMTQSPSSLSASVGDRVTITCHASQNIYVHLNWYQQKPGKAPK |
| | CL (RK) | LLIYKASNLHTGVPSRFSGSGSGTDFTLTISSLQPEDFATYYCQQ |
| | | AQTYPYTFGGGTKVEIKRTVAAPSVFIFPPSDRKLKSGTASVVCL |
| | | LNNFYPREAKVQWKVDNALQSGNSQESVTEQDSKDSTYSLSSTLT |
| | | LSKADYEKHKVYACEVTHQGLSSPVTKSFNRGEC |
| 121 | VL (CD28 variant l)-CL | DIQMTQSPSSLSASVGDRVTITCHASQNIYVFLNWYQQKPGKAPK |
| | (RK) | LLIYKASNLHTGVPSRFSGSGSGTDFTLTISSLQPEDFATYYCQQ |
| | | GQTYPYTFGGGTKVEIKRTVAAPSVFIFPPSDRKLKSGTASVVCL |
| | | LNNFYPREAKVQWKVDNALQSGNSQESVTEQDSKDSTYSLSSTLT |
| | | LSKADYEKHKVYACEVTHQGLSSPVTKSFNRGEC |
| 122 | VL (CD28 variant m)- | DIQMTQSPSSLSASVGDRVTITCHASQNIYVYLNWYQQKPGKAPK |
| | CL (RK) | LLIYKASNLHTGVPSRFSGSGSGTDFTLTISSLQPEDFATYYCQQ |
| | | GQTYPYTFGGGTKVEIKRTVAAPSVFIFPPSDRKLKSGTASVVCL |
| | | LNNFYPREAKVQWKVDNALQSGNSQESVTEQDSKDSTYSLSSTLT |
| | | LSKADYEKHKVYACEVTHQGLSSPVTKSFNRGEC |
| 123 | VL (CD28 variant r)-CL | DIQMTQSPSSLSASVGDRVTITCHASQGIYVYLNWYQQKPGKAPK |
| | (RK) | LLIYKASNLHTGVPSRFSGSGSGTDFTLTISSLQPEDFATYYCQQ |
| | | GQTYPYTFGGGTKVEIKRTVAAPSVFIFPPSDRKLKSGTASVVCL |
| | | LNNFYPREAKVQWKVDNALQSGNSQESVTEQDSKDSTYSLSSTLT |
| | | LSKADYEKHKVYACEVTHQGLSSPVTKSFNRGEC |
| 124 | VL (CD28 variant s)- | DIQMTQSPSSLSASVGDRVTITCHASQGISVYLNWYQQKPGKAPK |
| | CL (RK) | LLIYKASNLHTGVPSRFSGSGSGTDFTLTISSLQPEDFATYYCQQ |
| | | GQTYPYTFGGGTKVEIKRTVAAPSVFIFPPSDRKLKSGTASVVCL |
| | | LNNFYPREAKVQWKVDNALQSGNSQESVTEQDSKDSTYSLSSTLT |
| | | LSKADYEKHKVYACEVTHQGLSSPVTKSFNRGEC |
| 125 | VL (CD28 variant t)-CL | DIQMTQSPSSLSASVGDRVTITCRASQNIYVWLNWYQQKPGKAPK |
| | (RK) | LLIYKASNLYSGVPSRFSGSRSGTDFTLTISSLQPEDFATYYCQQ |
| | | GQTYPYTFGQGTKLEIKRTVAAPSVFIFPPSDRKLKSGTASVVCL |
| | | LNNFYPREAKVQWKVDNALQSGNSQESVTEQDSKDSTYSLSSTLT |
| | | LSKADYEKHKVYACEVTHQGLSSPVTKSFNRGEC |
| 126 | Fc hole PGLALA, | DKTHTCPPCPAPEAAGGPSVFLFPPKPKDTLMISRTPEVTCVVVD |
| | HYRF | VSHEDPEVKFNWYVDGVEVHNAKTKPREEQYNSTYRVVSVLTVLH |
| | | QDWLNGKEYKCKVSNKALGAPIEKTISKAKGQPREPQVCTLPPSR |
| | | DELTKNQVSLSCAVKGFYPSDIAVEWESNGQPENNYKTTPPVLDS |
| | | DGSFFLVSKLTVDKSRWQQGNVFSCSVMHEALHNRFTQKSLSLSP |
| 127 | CEA CDR-H1 | SYWMH |
| 128 | CEA CDR-H2 | FIRNKANGGTTEYAASVKG |
| 129 | CEA CDR-H3 | DRGLRFYFDY |
| 130 | CEA CDR-L1 | TLRRGINVGAYSTY |
| 131 | CEA CDR-L2 | YKSDSDKQQGSGV |
| 132 | CEA CDR-L3 | MIWHSGASAV |
| 133 | CEA VH | EVQLVESGGGLVQPGRSLRLSCAASGFTVSSYWMHWVRQAPGKGL |
| | | EWVGFIRNKANGGTTEYAASVKGRFTISRDDSKNTLYLQMNSLRA |
| | | EDTAVYYCARDRGLRFYFDYWGQGTTVTVSS |
| 134 | CEA VL | QAVLTQPASLSASPGASASLTCTLRRGINVGAYSIYWYQQKPGSP |
| | | PQYLLRYKSDSDKQQGSGVSSRFSASKDASANAGILLISGLQSED |
| | | EADYYCMIWHSGASAVFGGGTKLTVL |
| 135 | His-tagged human FAP | RPSRVHNSEENTMRALTLKDILNGTFSYKTFFPNWISGQEYLHQS |
| | ECD | ADNNIVLYNIETGQSYTILSNRTMKSVNASNYGLSPDRQFVYLES |
| | | DYSKLWRYSYTATYYIYDLSNGEFVRGNELPRPIQYLCWSPVGSK |
| | | LAYVYQNNIYLKQRPGDPPFQITFNGRENKIFNGIPDWVYEEEML |
| | | ATKYALWWSPNGKFLAYAEFNDTDIPVIAYSYYGDEQYPRTINTP |
| | | YPKAGAKNPVVRIFIIDTTYPAYVGPQEVPVPAMIASSDYYFSWL |
| | | TWVTDERVCLQWLKRVQNVSVLSICDFREDWQTWDCPKTQEHIEE |
| | | SRTGWAGGFFVSTPVFSYDAISYYKIFSDKDGYKHIHYIKDTVEN |
| | | AIQITSGKWEAINIFRVTQDSLFYSSNEFEEYPGRRNIYRISIGS |
| | | YPPSKKCVTCHLRKERCQYYTASFSDYAKYYALVCYGPGIPISTL |
| | | HDGRTDQEIKILEENKELENALKNIQLPKEEIKKLEVDEITLWYK |
| | | MILPPQFDRSKKYPLLIQVYGGPCSQSVRSVFAVNWISYLASKEG |
| | | MVIALVDGRGTAFQGDKLLYAVYRKLGVYEVEDQITAVRKFIEMG |
| | | FIDEKRIAIWGWSYGGYVSSLALASGTGLFKCGIAVAPVSSWEYY |
| | | ASVYTERFMGLPTKDDNLEHYKNSTVMARAEYFRNVDYLLIHGTA |
| | | DDNVHFQNSAQIAKALVNAQVDFQAMWYSDQNHGLSGLSTNHLYT |
| | | HMTHFLKQCFSLSDGKKKKKKGHHHHHH |
| 136 | mouse FAP | UniProt accession no. P97321 |
| 137 | His-tagged mouse FAP | RPSRVYKPEGNTKRALTLKDILNGTFSYKTYFPNWISEQEYLHQS |
| | RAD | EDDNIVFYNIETRESYIILSNSTMKSVNATDYGLSPDRQFVYLES |
| | | DYSKLWRYSYTATYYIYDLQNGEFVRGYELPRPIQYLCWSPVGSK |
| | | LAYVYQNNIYLKQRPGDPPFQITYTGRENRIFNGIPDWVYEEEML |
| | | ATKYALWWSPDGKFLAYVEFNDSDIPIIAYSYYGDGQYPRTINIP |
| | | YPKAGAKNPVVRVFIVDTTYPHHVGPMEVPVPEMIASSDYYFSWL |
| | | TWVSSERVCLQWLKRVQNVSVLSICDFREDWHAWECPKNQEHVEE |
| | | SRTGWAGGFFVSTPAFSQDATSYYKIFSDKDGYKHIHYIKDTVEN |
| | | AIQITSGKWEAIYIFRVTQDSLFYSSNEFEGYPGRRNIYRISIGN |
| | | SPPSKKCVTCHLRKERCQYYTASFSYKAKYYALVCYGPGLPISTL |
| | | HDGRTDQEIQVLEENKELENSLRNIQLPKVEIKKLKDGGLTFWYK |
| | | MILPPQFDRSKKYPLLIQVYGGPCSQSVKSVFAVNWITYLASKEG |
| | | IVIALVDGRGTAFQGDKFLHAVYRKLGVYEVEDQLTAVRKFIEMG |
| | | FIDEERIAIWGWSYGGYVSSLALASGTGLFKCGIAVAPVSSWEYY |
| | | ASIYSERFMGLPTKDDNLEHYKNSTVMARAEYFRNVDYLLIHGTA |
| | | DDNVHFQNSAQIAKALVNAQVDFQAMWYSDQNHGILSGRSQNHLY |
| | | THMTHFLKQCFSLSDGKKKKKKGHHHHHH |
| 138 | His-tagged cynomolgus | RPPRVHNSEENTMRALTLKDILNGTFSYKTFFPNWISGQEYLHQS |
| | FAP ECD | ADNNIVLYNIETGQSYTILSNRTMKSVNASNYGLSPDRQFVYLES |
| | | DYSKLWRYSYTATYYIYDLSNGEFVRGNELPRPIQYLCWSPVGSK |
| | | LAYVYQNNIYLKQRPGDPPFQITFNGRENKIFNGIPDWVYEEEML |
| | | ATKYALWWSPNGKFLAYAEFNDTDIPVIAYSYYGDEQYPRTINIP |
| | | YPKAGAKNPFVRIFIIDTTYPAYVGPQEVPVPAMIASSDYYFSWL |
| | | TWVTDERVCLQWLKRVQNVSVLSICDFREDWQTWDCPKTQEHIEE |
| | | SRTGWAGGFFVSTPVFSYDAISYYKIFSDKDGYKHIHYIKDTVEN |
| | | AIQITSGKWEAINIFRVTQDSLFYSSNEFEDYPGRRNIYRISIGS |
| | | YPPSKKCVTCHLRKERCQYYTASFSDYAKYYALVCYGPGIPISTL |
| | | HDGRTDQEIKILEENKELENALKNIQLPKEEIKKLEVDEITLWYK |
| | | MILPPQFDRSKKYPLLIQVYGGPCSQSVRSVFAVNWISYLASKEG |
| | | MVIALVDGRGTAFQGDKLLYAVYRKLGVYEVEDQITAVRKFIEMG |
| | | FIDEKRIAIWGWSYGGYVSSLALASGTGLFKCGIAVAPVSSWEYY |
| | | ASVYTERFMGLPTKDDNLEHYKNSTVMARAEYFRNVDYLLIHGTA |
| | | DDNVHFQNSAQIAKALVNAQVDFQAMWYSDQNHGLSGLSTNHLYT |
| | | HMTHFLKQCFSLSDGKKKKKKGHHHHHH |
| 139 | human FolR1 | UniProt accession no. P15328 |
| 140 | murine FolR1 | UniProt accession no. P35846 |
| 141 | cynomolgus FolR1 | UniProt accession no. G7PR14 |
| 142 | human MCSP | UniProt accession no. Q6UVK1 |
| 143 | human EGFR | UniProt accession no. P00533 |
| 144 | human HER2 | Uniprot accession no. P04626 |
| 145 | p95 HER2 | MPIWKFPDEEGACQPCPINCTHSCVDLDDKGCPAEQRASPLTSII |
| | | SAVVGILLVVVLGVVFGILIKRRQQKIRKYTMRRLLQETELVEPL |
| | | TPSGAMPNQAQMRILKETELRKVKVLGSGAFGTVYKGIWIPDGEN |
| | | VKIPVAIKVLRENTSPKANKEILDEAYVMAGVGSPYVSRLLGICL |
| | | TSTVQLVTQLMPYGCLLDHVRENRGRLGSQDLLNWCMQIAKGMSY |
| | | LEDVRLVHRDLAARNVLVKSPNHVKITDFGLARLLDIDETEYHAD |
| | | GGKVPIKWMALESILRRRFTHQSDVWSYGVTVWELMTFGAKPYDG |
| | | IPAREIPDLLEKGERLPQPPICTIDVYMIMVKCWMIDSECRPRFR |
| | | ELVSEFSRMARDPQRFVVIQNEDLGPASPLDSTFYRSLLEDDDMG |
| | | DLVDAEEYLVPQQGFFCPDPAPGAGGMVHHRHRSSSTRSGGGDLT |
| | | LGLEPSEEEAPRSPLAPSEGAGSDVFDGDLGMGAAKGLQSLPTHD |
| | | PSPLQRYSEDPTVPLPSETDGYVAPLTCSPQPEYVNQPDVRPQPP |
| | | SPREGPLPAARPAGATLERPKTLSPGKNGVVKDVFAFGGAVENPE |
| | | YLTPQGGAAPQPHPPPAFSPAFDNLYYWDQDPPERGAPPSTFKGT |
| | | PTAENPEYLGLDVPV |
| 146 | Peptide linker (G4S) | GGGGS |
| 147 | Peptide linker (G4S)2 | GGGGSGGGGS |
| 148 | Peptide linker (SG4)2 | SGGGGSGGGG |
| 149 | Peptide linker | GGGGSGGGGSGGGG |
| | G4(SG4)2 | |
| 150 | peptide linker | GSPGSSSSGS |
| 151 | (G4S)3 peptide linker | GGGGSGGGGSGGGGS |
| 152 | (G4S)4 peptide linker | GGGGSGGGGSGGGGSGGGGS |
| 153 | peptide linker | GSGSGSGS |
| 154 | peptide linker | GSGSGNGS |
| 155 | peptide linker | GGSGSGSG |
| 156 | peptide linker | GGSGSG |
| 157 | peptide linker | GGSG |
| 158 | peptide linker | GGSGNGSG |
| 159 | peptide linker | GGNGSGSG |
| 160 | peptide linker | GGNGSG |
| 161 | Light chain | DIQMTQSPSSLSASVGDRVTITCKASAAVGTYVAWYQQKPGKAPK |
| | “CEA _{2F1}” | LLIYSASYRKRGVPSRFSGSGSGTDFTLTISSLQPEDFATYYCHQ |
| | (CEA TCB) | YYTYPLFTFGQGTKLEIKRTVAAPSVFIFPPSDEQLKSGTASVVC |
| | | LLNNFYPREAKVQWKVDNALQSGNSQESVTEQDSKDSTYSLSSTL |
| | | TLSKADYEKHKVYACEVTHQGLSSPVTKSFNRGEC |
| 162 | Light Chain humanized | QAVVTQEPSLTVSPGGTVTLTCGSSTGAVTTSNYANWVQEKPGQA |
| | CD3 _{CH2527} (Crossfab, | FRGLIGGTNKRAPGTPARFSGSLLGGKAALTLSGAQPEDEAEYYC |
| | VL-CH1) | ALWYSNLWVFGGGTKLTVLSSASTKGPSVFPLAPSSKSTSGGTAA |
| | | LGCLVKDYFPEPVTVSWNSGALTSGVHTFPAVLQSSGLYSLSSVV |
| | (CEA TCB) | TVPSSSLGTQTYICNVNHKPSNTKVDKKVEPKSC |
| 163 | CEA _{CH1A1A 98/99} - | QVQLVQSGAEVKKPGASVKVSCKASGYTFTEFGMNWVRQAPGQGL |
| | humanized CD3 _{CH2527} | EWMGWINTKTGEATYVEEFKGRVTFTTDTSTSTAYMELRSLRSDD |
| | (Crossfab VH-Ck)- | TAVYYCARWDFAYYVEAMDYWGQGTTVTVSSASTKGPSVFPLAPS |
| | Fc(knob) P329GLALA | SKSTSGGTAALGCLVKDYFPEPVTVSWNSGALTSGVHTFPAVLQS |
| | (CEA TCB) | SGLYSLSSVVTVPSSSLGTQTYICNVNHKPSNTKVDKKVEPKSCD |
| | | GGGGSGGGGSEVQLLESGGGLVQPGGSLRLSCAASGFTFSTYAMN |
| | | WVRQAPGKGLEWVSRIRSKYNNYATYYADSVKGRFTISRDDSKNT |
| | | LYLQMNSLRAEDTAVYYCVRHGNFGNSYVSWFAYWGQGTLVTVSS |
| | | ASVAAPSVFIFPPSDEQLKSGTASVVCLLNNFYPREAKVQWKVDN |
| | | ALQSGNSQESVTEQDSKDSTYSLSSTLTLSKADYEKHKVYACEVT |
| | | HQGLSSPVTKSFNRGECDKTHTCPPCPAPEAAGGPSVFLFPPKPK |
| | | DTLMISRTPEVTCVVVDVSHEDPEVKFNWYVDGVEVHNAKTKPRE |
| | | EQYNSTYRVVSVLTVLHQDWLNGKEYKCKVSNKALGAPIEKTISK |
| | | AKGQPREPQVYTLPPCRDELTKNQVSLWCLVKGFYPSDIAVEWES |
| | | NGQPENNYKTTPPVLDSDGSFFLYSKLTVDKSRWQQGNVFSCSVM |
| | | HEALHNHYTQKSLSLSP |
| 164 | CEA _{CH1A1A 98/99} (VH- | QVQLVQSGAEVKKPGASVKVSCKASGYTFTEFGMNWVRQAPGQGL |
| | CH1)-Fc(hole) | EWMGWINTKTGEATYVEEFKGRVTFTTDTSTSTAYMELRSLRSDD |
| | P329GLALA | TAVYYCARWDFAYYVEAMDYWGQGTTVTVSSASTKGPSVFPLAPS |
| | (CEA TCB) | SKSTSGGTAALGCLVKDYFPEPVTVSWNSGALTSGVHTFPAVLQS |
| | | SGLYSLSSVVTVPSSSLGTQTYICNVNHKPSNTKVDKKVEPKSCD |
| | | KTHTCPPCPAPEAAGGPSVFLFPPKPKDTLMISRTPEVTCVVVDV |
| | | SHEDPEVKFNWYVDGVEVHNAKTKPREEQYNSTYRVVSVLTVLHQ |
| | | DWLNGKEYKCKVSNKALGAPIEKTISKAKGQPREPQVCTLPPSRD |
| | | ELTKNQVSLSCAVKGFYPSDIAVEWESNGQPENNYKTTPPVLDSD |
| | | GSFFLVSKLTVDKSRWQQGNVFSCSVMHEALHNHYTQKSLSLSP |
| 165 | CD3 VH-CL | EVQLLESGGGLVQPGGSLRLSCAASGFTFSTYAMNWVRQAPGKGL |
| | (CEACAM5 TCB) | EWVSRIRSKYNNYATYYADSVKGRFTISRDDSKNTLYLQMNSLRA |
| | | EDTAVYYCVRHGNFGNSYVSWFAYWGQGTLVTVSSASVAAPSVFI |
| | | FPPSDEQLKSGTASVVCLLNNFYPREAKVQWKVDNALQSGNSQES |
| | | VTEQDSKDSTYSLSSTLTLSKADYEKHKVYACEVTHQGLSSPVTK |
| | | SFNRGEC |
| 166 | humanized CEA VH- | QVQLVQSGAEVKKPGSSVKVSCKASGFNIKDTYMHWVRQAPGQGL |
| | CH1(EE)-Fc (hole, P329G | EWMGRIDPANGNSKYVPKFQGRVTITADTSTSTAYMELSSLRSED |
| | LALA) | TAVYYCAPFGYYVSDYAMAYWGQGTLVTVSSASTKGPSVFPLAPS |
| | (CEACAM5 TCB) | SKSTSGGTAALGCLVEDYFPEPVTVSWNSGALTSGVHTFPAVLQS |
| | | SGLYSLSSVVTVPSSSLGTQTYICNVNHKPSNTKVDEKVEPKSCD |
| | | KTHTCPPCPAPEAAGGPSVFLFPPKPKDTLMISRTPEVTCVVVDV |
| | | SHEDPEVKFNWYVDGVEVHNAKTKPREEQYNSTYRVVSVLTVLHQ |
| | | DWLNGKEYKCKVSNKALGAPIEKTISKAKGQPREPQVCTLPPSRD |
| | | ELTKNQVSLSCAVKGFYPSDIAVEWESNGQPENNYKTTPPVLDSD |
| | | GSFFLVSKLTVDKSRWQQGNVFSCSVMHEALHNHYTQKSLSLSP |
| 167 | humanized CEA VH- | QVQLVQSGAEVKKPGSSVKVSCKASGFNIKDTYMHWVRQAPGQGL |
| | CH1(EE)-CD3 VL-CH1- | EWMGRIDPANGNSKYVPKFQGRVTITADTSTSTAYMELSSLRSED |
| | Fc (knob, P329G LALA) | TAVYYCAPFGYYVSDYAMAYWGQGTLVTVSSASTKGPSVFPLAPS |
| | (CEACAM5 TCB) | SKSTSGGTAALGCLVEDYFPEPVTVSWNSGALTSGVHTFPAVLQS |
| | | SGLYSLSSVVTVPSSSLGTQTYICNVNHKPSNTKVDEKVEPKSCD |
| | | GGGGSGGGGSQAVVTQEPSLTVSPGGTVTLTCGSSTGAVTTSNYA |
| | | NWVQEKPGQAFRGLIGGTNKRAPGTPARFSGSLLGGKAALTLSGA |
| | | QPEDEAEYYCALWYSNLWVFGGGTKLTVLSSASTKGPSVFPLAPS |
| | | SKSTSGGTAALGCLVKDYFPEPVTVSWNSGALTSGVHTFPAVLQS |
| | | SGLYSLSSVVTVPSSSLGTQTYICNVNHKPSNTKVDKKVEPKSCD |
| | | KTHTCPPCPAPEAAGGPSVFLFPPKPKDTLMISRTPEVTCVVVDV |
| | | SHEDPEVKFNWYVDGVEVHNAKTKPREEQYNSTYRVVSVLTVLHQ |
| | | DWLNGKEYKCKVSNKALGAPIEKTISKAKGQPREPQVYTLPPCRD |
| | | ELTKNQVSLWCLVKGFYPSDIAVEWESNGQPENNYKTTPPVLDSD |
| | | GSFFLYSKLTVDKSRWQQGNVFSCSVMHEALHNHYTQKSLSLSP |
| 168 | humanized CEA VL- | EIVLTQSPATLSLSPGERATLSCRAGESVDIFGVGFLHWYQQKPG |
| | CL(RK) | QAPRLLIYRASNRATGIPARFSGSGSGTDFTLTISSLEPEDFAVY |
| | (CEACAM5 TCB) | YCQQTNEDPYTFGQGTKLEIKRTVAAPSVFIFPPSDRKLKSGTAS |
| | | VVCLLNNFYPREAKVQWKVDNALQSGNSQESVTEQDSKDSTYSLS |
| | | STLTLSKADYEKHKVYACEVTHQGLSSPVTKSFNRGEC |
| 169 | CEACAM5-based | QLTTESMPFNVAEGKEVLLLVHNLPQQLFGYSWYKGERVDGNRQI |
| | antigen Hu N(A2-B2)A- | VGYAIGTQQATPGPANSGRETIYPNASLLIQNVTQNDTGFYTLQV |
| | avi-His | IKSDLVNEEATGQFHVYPELPKPFITSNNSNPVEDEDAVALTCEP |
| | | EIQNTTYLWWVNNQSLPVSPRLQLSNDNRTLTLLSVTRNDVGPYE |
| | | CGIQNKLSVDHSDPVILNVLYGPDDPTISPSYTYYRPGVNLSLSC |
| | | HAASNPPAQYSWLIDGNIQQHTQELFISNITEKNSGLYTCQANNS |
| | | ASGHSRTTVKTITVSALSPVVAKPQIKASKTTVTGDKDSVNLTCS |
| | | TNDTGISIRWFFKNQSLPSSERMKLSQGNITLSINPVKREDAGTY |
| | | WCEVFNPISKNQSDPIMLNVNYNALPQENLINVDGSGLNDIFEAQ |
| | | KIEWHEARAHHHHHH |
| 170 | CEA (A5B7)- CDR-H1 | DYYMN |
| 171 | CEA (A5B7)- CDR-H2 | FIGNKANGYTTEYSASVKG |
| 172 | CEA (A5B7)- CDR-H3 | DRGLRFYFDY |
| 173 | CEA (A5B7)- CDR-L1 | RASSSVTYIH |
| 174 | CEA (A5B7)- CDR-L2 | ATSNLAS |
| 175 | CEA (A5B7)- CDR-L3 | QHWSSKPPT |
| 176 | IgG1 Fc knob PGLALA | APEAAGGPSVFLFPPKPKDTLMISRTPEVTCVVVDVSHEDPEVKF |
| | | NWYVDGVEVHNAKTKPREEQYNSTYRVVSVLTVLHQDWLNGKEYK |
| | | CKVSNKALGAPIEKTISKAKGQPREPQVYTLPPCRDELTKNQVSL |
| | | WCLVKGFYPSDIAVEWESNGQPENNYKTTPPVLDSDGSFFLYSKL |
| | | TVDKSRWQQGNVFSCSVMHEALHNHYTQKSLSLSP |
| 177 | IgG1 Fc hole PGLALA | APEAAGGPSVFLFPPKPKDTLMISRTPEVTCVVVDVSHEDP |
| | | EVKFNWYVDGVEVHNAKTKPREEQYNSTYRVVSVLTVLHQD |
| | | WLNGKEYKCKVSNKALGAPIEKTISKAKGQPREPQVCTLPP |
| | | SRDELTKNQVSLSCAVKGFYPSDIAVEWESNGQPENNYKTT |
| | | PPVLDSDGSFFLVSKLTVDKSRWQQGNVESCSVMHEALHNH |
| | | YTQKSLSLSP |
| 178 | CEA (A5B7) VH | EVKLVESGGGLVQPGGSLRLSCATSGFTFTDYYMNWVRQPP |
| | (parental) | GKALEWLGFIGNKANGYTTEYSASVKGRFTISRDKSQSILY |
| | | LQMNTLRAEDSATYYCTRDRGLRFYFDYWGQGTTLTVSS |
| 179 | CEA (A5B7) VL | QTVLSQSPAILSASPGEKVTMTCRASSSVTYIHWYQQKPGS |
| | (parental) | SPKSWIYATSNLASGVPARFSGSGSGTSYSLTISRVEAEDA |
| | | ATYYCQHWSSKPPTFGGGTKLEIK |
| 180 | CEA (A5H1EL1D)- | GFTFTDYYMN |
| | CDR-H1 | |
| 181 | CEA (A5H1EL1D)- | FIGNKANAYTTEYSASVKG |
| | CDR-H2 | |
| 182 | CEA (A5H1EL1D)- | DRGLRFYFDY |
| | CDR-H3 | |
| 183 | CEA (A5H1EL1D)- | RASSSVTYIH |
| | CDR-L1 | |
| 184 | CEA (A5H1EL1D)- | ATSNLAS |
| | CDR-L2 | |
| 185 | CEA (A5H1EL1D)- | QHWSSKPPT |
| | CDR-L3 | |
| 186 | CEA (A5H1EL1D) VH | EVQLLESGGGLVQPGGSLRLSCAASGFTFTDYYMNWVRQAP |
| | (3-23A5-1E) | GKGLEWLGFIGNKANAYTTEYSASVKGRFTISRDKSKNTLY |
| | | LQMNSLRAEDTATYYCTRDRGLRFYFDYWGQGTTVTVSS |
| 187 | CEA (A5H1EL1D) VL | EIVLTQSPATLSLSPGERATLSCRASSSVTYIHWYQQKPGQ |
| | (A5-L1D) | APRSWIYATSNLASGIPARFSGSGSGTDFTLTISSLEPEDF |
| | | AVYYCQHWSSKPPTFGQGTKLEIK |
| 188 | CEA (A5H1EL1D aff. | GFX₁FX₂DYX₃MN, wherein |
| | mat.) CDR-H1 | X₁ is T or Y, |
| | consensus | X₂ is T or S, and |
| | | X₃ is Y or A or E |
| 189 | CEA (A5H1EL1D aff. | X₄IX₅NKANAYTTEYSASVKG, wherein |
| | mat.) CDR-H2 | X₄ is F or V, |
| | consensus | X₅ is G or S |
| 190 | CEA (A5H1EL1D aff. | DRGX₆RFX₇FDY, wherein |
| | mat.) CDR-H3 | X₆ is L or I, |
| | consensus | X₇ is Y or G or Q or S |
| 191 | CEA (A5H1EL1D aff. | X₈ASSSVTYTH, wherein |
| | mat.) CDR-L1 | X₈ is R or H |
| | consensus | |
| 192 | CEA (A5H1EL1D aff. | ATSNLAS |
| | mat.) CDR-L2 | |
| | consensus | |
| 193 | CEA (A5H1EL1D aff. | QHWSSX₉X₁₀PT, wherein |
| | mat.) CDR-L3 | X₉ is K or V or Q or I, |
| | consensus | X₁₀ is P or S |
| 194 | CEA (P006.038) VH | EVQLLESGGGLVQPGGSLRLSCAASGFTFTDYYMNWV |
| | | RQAPGKGLEWLGFIGNKANAYTTEYSASVKGRFTISR |
| | | DKSKNTLYLQMNSLRAEDTATYYCTRDRGIRFGFDYW |
| | | GQGTTVTVSS |
| 195 | CEA (P006.038) VL | EIVLTQSPATLSLSPGERATLSCRASSSVTYIHWYQQ |
| | | KPGQAPRSWIYATSNLASGIPARFSGSGSGTDFTLTI |
| | | SSLEPEDFAVYYCQHWSSVPPTFGQGTKLEIK |
| 196 | CEA (P005.097) VH | EVQLLESGGGLVQPGGSLRLSCAASGFTFTDYYMNWV |
| | | RQAPGKGLEWLGFIGNKANAYTTEYSASVKGRFTISR |
| | | DKSKNTLYLQMNSLRAEDTATYYCTRDRGLRFSFDYW |
| | | GQGTTVTVSS |
| 197 | CEA (P005.097) VL | EIVLTQSPATLSLSPGERATLSCRASSSVTYIHWYQQ |
| | | KPGQAPRSWIYATSNLASGIPARFSGSGSGTDFTLTI |
| | | SSLEPEDFAVYYCQHWSSQPPTFGQGTKLEIK |
| 198 | CEA (P005.103) VH | EVQLLESGGGLVQPGGSLRLSCAASGFTFTDYYMNWV |
| | | RQAPGKGLEWLGFIGNKANAYTTEYSASVKGRFTISR |
| | | DKSKNTLYLQMNSLRAEDTATYYCTRDRGIRFYFDYW |
| | | GQGTTVTVSS |
| 199 | CEA (P005.103) VL | EIVLTQSPATLSLSPGERATLSCRASSSVTYIHWYQQ |
| | | KPGQAPRSWIYATSNLASGIPARFSGSGSGTDFTLTI |
| | | SSLEPEDFAVYYCQHWSSISPTFGQGTKLEIK |
| 200 | CEA (P002.139) VH | EVQLLESGGGLVQPGGSLRLSCAASGFYFTDYAMNWV |
| | | RQAPGKGLEWLGVISNKANAYTTEYSASVKGRFTISR |
| | | DKSKNTLYLQMNSLRAEDTATYYCTRDRGLRFYFDYW |
| | | GQGTTVTVSS |
| 201 | CEA (P002.139) VL | EIVLTQSPATLSLSPGERATLSCHASSSVTYIHWYQQ |
| | | KPGQAPRSWIYATSNLASGIPARFSGSGSGTDFTLTI |
| | | SSLEPEDFAVYYCQHWSSKPPTFGQGTKLEIK |
| 202 | CEA (P001.177) VH | EVQLLESGGGLVQPGGSLRLSCAASGFYFTDYYMNWV |
| | | RQAPGKGLEWLGFISNKANAYTTEYSASVKGRFTISR |
| | | DKSKNTLYLQMNSLRAEDTATYYCTRDRGLRFYFDYW |
| | | GQGTTVTVSS |
| 203 | CEA (P001.177) VL | EIVLTQSPATLSLSPGERATLSCRASSSVTYIHWYQQ |
| | | KPGQAPRSWIYATSNLASGIPARFSGSGSGTDFTLTI |
| | | SSLEPEDFAVYYCQHWSSKPPTFGQGTKLEIK |
| 204 | CEA (P005.102) VH | EVQLLESGGGLVQPGGSLRLSCAASGFTFTDYYMNWV |
| | | RQAPGKGLEWLGFIGNKANAYTTEYSASVKGRFTISR |
| | | DKSKNTLYLQMNSLRAEDTATYYCTRDRGIRFQFDYW |
| | | GQGTTVTVSS |
| 205 | CEA (P005.102) VL | EIVLTQSPATLSLSPGERATLSCRASSSVTYIHWYQQ |
| | | KPGQAPRSWIYATSNLASGIPARFSGSGSGTDFTLTI |
| | | SSLEPEDFAVYYCQHWSSKSPTFGQGTKLEIK |
| 206 | CEA (P005.102 | EVQLLESGGGLVQPGGSLRLSCAASGFYFTDYYMNWV |
| | combo1) VH | RQAPGKGLEWLGVISNKANAYTTEYSASVKGRFTISR |
| | | DKSKNTLYLQMNSLRAEDTATYYCTRDRGIRFQFDYW |
| | | GQGTTVTVSS |
| 207 | CEA (P005.102 | EIVLTQSPATLSLSPGERATLSCRASSSVTYIHWYQQ |
| | combo1) VL | KPGQAPRSWIYATSNLASGIPARFSGSGSGTDFTLTI |
| | | SSLEPEDFAVYYCQHWSSKSPTFGQGTKLEIK |
| 208 | CEA (P005.102 | EVQLLESGGGLVQPGGSLRLSCAASGFYFSDYYMNWV |
| | combo2) VH | RQAPGKGLEWLGVISNKANAYTTEYSASVKGRFTISR |
| | | DKSKNTLYLQMNSLRAEDTATYYCTRDRGIRFQFDYW |
| | | GQGTTVTVSS |
| 209 | CEA (P005.102 | EIVLTQSPATLSLSPGERATLSCRASSSVTYIHWYQQ |
| | combo2) VL | KPGQAPRSWIYATSNLASGIPARFSGSGSGTDFTLTI |
| | | SSLEPEDFAVYYCQHWSSKSPTFGQGTKLEIK |
| 210 | CEA (P005.103 | EVQLLESGGGLVQPGGSLRLSCAASGFTFTDYYMNWV |
| | combo1) VH | RQAPGKGLEWLGFIGNKANAYTTEYSASVKGRFTISR |
| | | DKSKNTLYLQMNSLRAEDTATYYCTRDRGIRFSFDYW |
| | | GQGTTVTVSS |
| 211 | CEA (P005.103 | EIVLTQSPATLSLSPGERATLSCRASSSVTYIHWYQQ |
| | combo1) VL | KPGQAPRSWIYATSNLASGIPARFSGSGSGTDFTLTI |
| | | SSLEPEDFAVYYCQHWSSISPTFGQGTKLEIK |
| 212 | CEA (P005.103 | EVQLLESGGGLVQPGGSLRLSCAASGFYFTDYYMNWV |
| | combo2) VH | RQAPGKGLEWLGVISNKANAYTTEYSASVKGRFTISR |
| | | DKSKNTLYLQMNSLRAEDTATYYCTRDRGIRFSFDYW |
| | | GQGTTVTVSS |
| 213 | CEA (P005.103 | EIVLTQSPATLSLSPGERATLSCRASSSVTYIHWYQQKPGQ |
| | combo2) VL | APRSWIYATSNLASGIPARFSGSGSGTDFTLTISSLEPEDF |
| | | AVYYCQHWSSISPTFGQGTKLEIK |
| 214 | CEA (P006.038 | EVQLLESGGGLVQPGGSLRLSCAASGFYFTDYAMNWV |
| | combo1) VH | RQAPGKGLEWLGVISNKANAYTTEYSASVKGRFTISR |
| | | DKSKNTLYLQMNSLRAEDTATYYCTRDRGIRFGFDYW |
| | | GQGTTVTVSS |
| 215 | CEA (P006.038 | EIVLTQSPATLSLSPGERATLSCRASSSVTYIHWYQQ |
| | combo1) VL | KPGQAPRSWIYATSNLASGIPARFSGSGSGTDFTLTI |
| | | SSLEPEDFAVYYCQHWSSVPPTFGQGTKLEIK |
| 216 | CEA (P006.038 | EVQLLESGGGLVQPGGSLRLSCAASGFTFSDYEMNWV |
| | combo2) VH | RQAPGKGLEWLGFISNKANAYTTEYSASVKGRFTISR |
| | | DKSKNTLYLQMNSLRAEDTATYYCTRDRGIRFGFDYW |
| | | GQGTTVTVSS |
| 217 | CEA (P006.038 | EIVLTQSPATLSLSPGERATLSCRASSSVTYIHWYQQ |
| | combo2) VL | KPGQAPRSWIYATSNLASGIPARFSGSGSGTDFTLTI |
| | | SSLEPEDFAVYYCQHWSSVPPTFGQGTKLEIK |
| 218 | IGHV3-23-02 | EVQLLESGGGLVQPGGSLRLSCAASGFTFSSYAMSWVRQAPGKGL |
| | | EWVSAISGSGGSTYYGDSVKGRFTISRDNSKNTLYLQMNSLRAED |
| | | TAVYYCAK |
| 219 | IGHV3-15*01 | EVQLVESGGGLVKPGGSLRLSCAASGFTFSNAWMSWVRQAPGKGL |
| | | EWVGRIKSKTDGGTTDYAAPVKGRFTISRDDSKNTLYLQMNSLKT |
| | | EDTAVYYCTT |
| 220 | 3-23A5-1 | EVQLLESGGGLVQPGGSLRLSCAASGFTFTDYYMNWVRQAPGKGL |
| | | EWVGFIGNKANGYTTEYSASVKGRFTISRDNSKNTLYLQMNSLRA |
| | | EDTAVYYCARDRGLRFYFDYWGQGTTVTVSS |
| 221 | 3-23A5-2 | EVQLLESGGGLVQPGGSLRLSCAASGFTFTDYYMNWVRQAPGKGL |
| | | EWVGFIGNKANGYTTYYGDSVKGRFTISRDNSKNTLYLQMNSLRA |
| | | EDTAVYYCARDRGLRFYFDYWGQGTTVTVSS |
| 222 | 3-23A5-3 | EVQLLESGGGLVQPGGSLRLSCAASGFTFTDYYMNWVRQAPGKGL |
| | | EWVGFIGNKGYTTEYSASVKGRFTISRDNSKNTLYLQMNSLRAED |
| | | TAVYYCARDRGLRFYFDYWGQGTTVTVSS |
| 223 | 3-23A5-4 | EVQLLESGGGLVQPGGSLRLSCAASGFTFTDYYMSWVRQAPGKGL |
| | | EWVGFIGNKANGYTTEYSASVKGRFTISRDNSKNTLYLQMNSLRA |
| | | EDTAVYYCARDRGLRFYFDYWGQGTTVTVSS |
| 224 | 3-23A5-1A | EVQLLESGGGLVQPGGSLRLSCAASGFTFTDYYMNWVRQAPGKGL |
| | (all_backmutations) | EWLGFIGNKANGYTTEYSASVKGRFTISRDKSKNTLYLQMNSLRA |
| | | EDTATYYCTRDRGLRFYFDYWGQGTTVTVSS |
| 225 | 3-23A5-1C (A93T) | EVQLLESGGGLVQPGGSLRLSCAASGFTFTDYYMNWVRQAPGKGL |
| | | EWVGFIGNKANGYTTEYSASVKGRFTISRDNSKNTLYLQMNSLRA |
| | | EDTAVYYCTRDRGLRFYFDYWGQGTTVTVSS |
| 226 | 3-23A5-1D (K73) | EVQLLESGGGLVQPGGSLRLSCAASGFTFTDYYMNWVRQAPGKGL |
| | | EWVGFIGNKANGYTTEYSASVKGRFTISRDKSKNTLYLQMNSLRA |
| | | EDTAVYYCARDRGLRFYFDYWGQGTTVTVSS |
| 227 | 3-15A5-1 | EVQLVESGGGLVKPGGSLRLSCAASGFTFTDYYMNWVRQAPGKGL |
| | | EWVGFIGNKANGYTTEYSASVKGRFTISRDDSKNTLYLQMNSLKT |
| | | EDTAVYYCTRDRGLRFYFDYWGQGTTVTVSS |
| 228 | 3-15A5-2 | EVQLVESGGGLVKPGGSLRLSCAASGFTFTDYYMNWVRQAPGKGL |
| | | EWVGFIGNKANGYTTEYAAPVKGRFTISRDDSKNTLYLQMNSLKT |
| | | EDTAVYYCTRDRGLRFYFDYWGQGTTVTVSS |
| 229 | 3-15A5-3 | EVQLVESGGGLVKPGGSLRLSCAASGFTFTDYYMNWVRQAPGKGL |
| | | EWVGFIGNKANGGTTDYAAPVKGRFTISRDDSKNTLYLQMNSLKT |
| | | EDTAVYYCTRDRGLRFYFDYWGQGTTVTVSS |
| 230 | IGKV3 -11 | EIVLTQSPATLSLSPGERATLSCRASQSVSSYLAWYQQKPGQAPR |
| | | LLIYDASNRATGIPARFSGSGSGTDFTLTISSLEPEDFAVYYCQQ |
| | | RSNWP |
| 231 | A5-L1 | EIVLTQSPATLSLSPGERATLSCRASSSVTYIHWYQQKPGQAPRL |
| | | LIYATSNLASGIPARFSGSGSGTDFTLTISSLEPEDFAVYYCQHW |
| | | SSKPPTFGQGTKLEIK |
| 232 | A5-L2 | EIVLTQSPATLSLSPGERATLSCRASQSVSSYIHWYQQKPGQAPR |
| | | LLIYATSNLASGIPARFSGSGSGTDFTLTISSLEPEDFAVYYCQH |
| | | WSSKPPTFGQGTKLEIK |
| 233 | A5-L3 | EIVLTQSPATLSLSPGERATLSCRASSSVTYIHWYQQKPGQAPRL |
| | | LIYDASNRATGIPARFSGSGSGTDFTLTISSLEPEDFAVYYCQHW |
| | | SSKPPTFGQGTKLEIK |
| 234 | A5-L4 | EIVLTQSPATLSLSPGERATLSCRASSSVTYIHWYQQKPGQAPRL |
| | | LIYATSNLASGIPARFSGSGSGTDFTLTISSLEPEDFAVYYCQQW |
| | | SSKPPTFGQGTKLEIK |
| 235 | A5-L1A | QTVLTQSPATLSLSPGERATLSCRASSSVTYIHWYQQKPGSSPKS |
| | (all_backmutations) | WIYATSNLASGIPARFSGSGSGTDYTLTISSLEPEDFAVYYCQHW |
| | | SSKPPTFGQGTKLEIK |
| 236 | A5-L1B (Q1T2) | QTVLTQSPATLSLSPGERATLSCRASSSVTYIHWYQQKPGQAPRL |
| | | LIYATSNLASGIPARFSGSGSGTDFTLTISSLEPEDFAVYYCQHW |
| | | SSKPPTFGQGTKLEIK |
| 237 | A5-L1C (FR2) | EIVLTQSPATLSLSPGERATLSCRASSSVTYIHWYQQKPGSSPKS |
| | | WIYATSNLASGIPARFSGSGSGTDFTLTISSLEPEDFAVYYCQHW |
| | | SSKPPTFGQGTKLEIK |
| 238 | NABA-avi-His | See Table 15 |
| 239 | N(A2B2)A-avi-His | See Table 15 |
| 240 | NA(B2)A-avi-His | See Table 15 |
| 241 | A5H1EL1D_H1_rev_T | See Table 16 |
| | N | |
| 242 | A5H1EL1D_H2_for_T | See Table 16 |
| | N | |
| 243 | LMB3 long | See Table 16 |
| 244 | HCDR3-rev-constant | See Table 16 |
| 245 | A5H1EL1D_L1_rev_T | See Table 17 |
| | N | |
| 246 | A5H1EL1D_L2_for_T | See Table 17 |
| | N | |
| 247 | A5H1EL1D | See Table 18 |
| | _L3_for_TN | |
| 248 | A5H1EL1D | See Table 18 |
| | _H3_rev_TN | |
| 249 | LCDR3-rev-constant | See Table 18 |
| 250 | HCDR3 amplification | See Table 18 |
| 251 | CEA (P006.038)- CDR- | See Table 22 |
| | H1 | |
| 252 | CEA (P006.038)- CDR- | See Table 22 |
| | H2 | |
| 253 | CEA (P006.038)- CDR- | See Table 22 |
| | H3 | |
| 254 | CEA (P006.038)- CDR- | See Table 23 |
| | L1 | |
| 255 | CEA (P006.038)- CDR- | See Table 23 |
| | L2 | |
| 256 | CEA (P006.038)- CDR- | See Table 23 |
| | L3 | |
| 257 | CEA (P005.097)- CDR- | See Table 22 |
| | H1 | |
| 258 | CEA (P005.097)- CDR- | See Table 22 |
| | H2 | |
| 259 | CEA (P005.097)- CDR- | See Table 22 |
| | H3 | |
| 260 | CEA (P005.097)- CDR- | See Table 23 |
| | L1 | |
| 261 | CEA (P005.097)- CDR- | See Table 23 |
| | L2 | |
| 262 | CEA (P005.097)- CDR- | See Table 23 |
| | L3 | |
| 263 | CEA (P005.103)- CDR- | See Table 22 |
| | H1 | |
| 264 | CEA (P005.103)- CDR- | See Table 22 |
| | H2 | |
| 265 | CEA (P005.103)- CDR- | See Table 22 |
| | H3 | |
| 266 | CEA (P005.103)- CDR- | See Table 23 |
| | L1 | |
| 267 | CEA (P005.103)- CDR- | See Table 23 |
| | L2 | |
| 268 | CEA (P005.103)- CDR- | See Table 23 |
| | L3 | |
| 269 | CEA (P002.139)- CDR- | See Table 22 |
| | H1 | |
| 270 | CEA (P002.139)- CDR- | See Table 22 |
| | H2 | |
| 271 | CEA (P002.139)- CDR- | See Table 22 |
| | H3 | |
| 272 | CEA (P002.139)- CDR- | See Table 23 |
| | L1 | |
| 273 | CEA (P002.139)- CDR- | See Table 23 |
| | L2 | |
| 274 | CEA (P002.139)- CDR- | See Table 23 |
| | L3 | |
| 275 | CEA (P001.177)- CDR- | See Table 22 |
| | H1 | |
| 276 | CEA (P001.177)- CDR- | See Table 22 |
| | H2 | |
| 277 | CEA (P001.177)- CDR- | See Table 22 |
| | H3 | |
| 278 | CEA (P001.177)- CDR- | See Table 23 |
| | L1 | |
| 279 | CEA (P001.177)- CDR- | See Table 23 |
| | L2 | |
| 280 | CEA (P001.177)- CDR- | See Table 23 |
| | L3 | |
| 281 | CEA (P005.102)- CDR- | See Table 22 |
| | H1 | |
| 282 | CEA (P005.102)- CDR- | See Table 22 |
| | H2 | |
| 283 | CEA (P005.102)- CDR- | See Table 22 |
| | H3 | |
| 284 | CEA (P005.102)- CDR- | See Table 23 |
| | L1 | |
| 285 | CEA (P005.102)- CDR- | See Table 23 |
| | L2 | |
| 286 | CEA (P005.102)- CDR- | See Table 23 |
| | L3 | |
| 287 | CEA (P005.102- | See Table 22 |
| | combo1)- CDR-H1 | |
| 288 | CEA (P005.102- | See Table 22 |
| | combo1)- CDR-H2 | |
| 289 | CEA (P005.102- | See Table 22 |
| | combo1)- CDR-H3 | |
| 290 | CEA (P005.102- | See Table 23 |
| | combo1)- CDR-L1 | |
| 291 | CEA (P005.102- | See Table 23 |
| | combo1)- CDR-L2 | |
| 292 | CEA (P005.102- | See Table 23 |
| | combo1)- CDR-L3 | |
| 293 | CEA (P005.102- | See Table 22 |
| | combo2)- CDR-H1 | |
| 294 | CEA (P005.102- | See Table 22 |
| | combo2)- CDR-H2 | |
| 295 | CEA (P005.102- | See Table 22 |
| | combo2)- CDR-H3 | |
| 296 | CEA (P005.102- | See Table 23 |
| | combo2)- CDR-L1 | |
| 297 | CEA (P005.102- | See Table 23 |
| | combo2)- CDR-L2 | |
| 298 | CEA (P005.102- | See Table 23 |
| | combo2)- CDR-L3 | |
| 299 | CEA (P005.103- | See Table 22 |
| | combo1)- CDR-H1 | |
| 300 | CEA (P005.103- | See Table 22 |
| | combo1)- CDR-H2 | |
| 301 | CEA (P005.103- | See Table 22 |
| | combo1)- CDR-H3 | |
| 302 | CEA (P005.103- | See Table 23 |
| | combo1)- CDR-L1 | |
| 303 | CEA (P005.103- | See Table 23 |
| | combo1)- CDR-L2 | |
| 304 | CEA (P005.103- | See Table 23 |
| | combo1)- CDR-L3 | |
| 305 | CEA (P005.103- | See Table 22 |
| | combo2)- CDR-H1 | |
| 306 | CEA (P005.103- | See Table 22 |
| | combo2)- CDR-H2 | |
| 307 | CEA (P005.103- | See Table 22 |
| | combo2)- CDR-H3 | |
| 308 | CEA (P005.103- | See Table 23 |
| | combo2)- CDR-L1 | |
| 309 | CEA (P005.103- | See Table 23 |
| | combo2)- CDR-L2 | |
| 310 | CEA (P005.103- | See Table 23 |
| | combo2)- CDR-L3 | |
| 311 | CEA (P006.038- | See Table 22 |
| | combo1)- CDR-H1 | |
| 312 | CEA (P006.038- | See Table 22 |
| | combo1)- CDR-H2 | |
| 313 | CEA (P006.038- | See Table 22 |
| | combo1)- CDR-H3 | |
| 314 | CEA (P006.038- | See Table 23 |
| | combo1)- CDR-L1 | |
| 315 | CEA (P006.038- | See Table 23 |
| | combo1)- CDR-L2 | |
| 316 | CEA (P006.038- | See Table 23 |
| | combo1)- CDR-L3 | |
| 317 | CEA (P006.038- | See Table 22 |
| | combo2)- CDR-H1 | |
| 318 | CEA (P006.038- | See Table 22 |
| | combo2)- CDR-H2 | |
| 319 | CEA (P006.038- | See Table 22 |
| | combo2)- CDR-H3 | |
| 320 | CEA (P006.038- | See Table 23 |
| | combo2)- CDR-L1 | |
| 321 | CEA (P006.038- | See Table 23 |
| | combo2)- CDR-L2 | |
| 322 | CEA (P006.038- | See Table 23 |
| | combo2)- CDR-L3 | |
| 323 | VL CEA (A5H1EL1D) | See Table 24 |
| | -CH1- Fc hole | |
| | PGLALA | |
| 324 | VH CEA (A5H1EL1D) | See Table 24 |
| | -CL | |
| 325 | VL CEA (P006.038) - | See Table 24 |
| | CH1- Fc hole PGLALA | |
| 326 | VH CEA (P006.038) - | See Table 24 |
| | CL | |
| 327 | VL CEA (P005.097) - | See Table 24 |
| | CH1- Fc hole PGLALA | |
| 328 | VH CEA (P005.097) - | See Table 24 |
| | CL | |
| 329 | VL CEA (P005.103) - | See Table 24 |
| | CH1- Fc hole PGLALA | |
| 330 | VH CEA (P005.103) - | See Table 24 |
| | CL | |
| 331 | VL CEA (P002.139) - | See Table 24 |
| | CH1- Fc hole PGLALA | |
| 332 | VH CEA (P002.139) - | See Table 24 |
| | CL | |
| 333 | VL CEA (P001.177) - | See Table 24 |
| | CH1- Fc hole PGLALA | |
| 334 | VH CEA (P001.177) - | See Table 24 |
| | CL | |
| 335 | VL CEA (P005.102) - | See Table 24 |
| | CH1- Fc hole PGLALA | |
| 336 | VH CEA (P005.102) - | See Table 24 |
| | CL | |
| 337 | VL CEA (P005.102 | See Table 24 |
| | combo1) -CH1- Fc hole | |
| | PGLALA | |
| 338 | VH CEA (P005.102 | See Table 24 |
| | combo1) - CL | |
| 339 | VL CEA (P005.102 | See Table 24 |
| | combo2) -CH1- Fc hole | |
| | PGLALA | |
| 340 | VH CEA (P005.102 | See Table 24 |
| | combo2) - CL | |
| 341 | VL CEA (P005.103 | See Table 24 |
| | combo1) -CH1- Fc hole | |
| | PGLALA | |
| 342 | VH CEA (P005.103 | See Table 24 |
| | combo1) - CL | |
| 343 | VL CEA (P005.103 | See Table 24 |
| | combo2) -CH1- Fc hole | |
| | PGLALA | |
| 344 | VH CEA (P005.103 | See Table 24 |
| | combo2) - CL | |
| 345 | VL CEA (P006.038 | See Table 24 |
| | combo1) -CH1- Fc hole | |
| | PGLALA | |
| 346 | VH CEA (P006.038 | See Table 24 |
| | combo1) - CL | |
| 347 | VL CEA (P006.038 | See Table 24 |
| | combo2) -CH1- Fc hole | |
| | PGLALA | |
| 348 | VH CEA (P006.038 | See Table 24 |
| | combo2) - CL | |
| 349 | VH CD28 (SA_Variant | See Table 24 |
| | 15) - CH1- Fc knob | |
| | PGLALA | |
| 350 | VL CD28 (SA_Varaint | See Table 24 |
| | 15) - CL | |
| 351 | CEA(A5H1EL1D) VL- | EIVLTQSPATLSLSPGERATLSCRASSSVTYIHWYQQKPGQAPRS |
| | CH1 hu IgG1 Fc hole | WIYATSNLASGIPARFSGSGSGTDFTLTISSLEPEDFAVYYCQHW |
| | PGLALA | SSKPPTFGQGTKLEIKSSASTKGPSVFPLAPSSKSTSGGTAALGC |
| | | LVKDYFPEPVTVSWNSGALTSGVHTFPAVLQSSGLYSLSSVVTVP |
| | | SSSLGTQTYICNVNHKPSNTKVDKKVEPKSCDKTHTCPPCPAPEA |
| | | AGGPSVFLFPPKPKDTLMISRTPEVTCVVVDVSHEDPEVKFNWYV |
| | | DGVEVHNAKTKPREEQYNSTYRVVSVLTVLHQDWLNGKEYKCKVS |
| | | NKALGAPIEKTISKAKGQPREPQVCTLPPSRDELTKNQVSLSCAV |
| | | KGFYPSDIAVEWESNGQPENNYKTTPPVLDSDGSFFLVSKLTVDK |
| | | SRWQQGNVFSCSVMHEALHNHYTQKSLSLSP |
| 352 | CEA(A5H1EL1D) VH- | EVQLLESGGGLVQPGGSLRLSCAASGFTFTDYYMNWVRQAPGKGL |
| | Ckappa | EWLGFIGNKANAYTTEYSASVKGRFTISRDKSKNTLYLQMNSLRA |
| | | EDTATYYCTRDRGLRFYFDYWGQGTTVTVSSASVAAPSVFIFPPS |
| | | DEQLKSGTASVVCLLNNFYPREAKVQWKVDNALQSGNSQESVTEQ |
| | | DSKDSTYSLSSTLTLSKADYEKHKVYACEVTHQGLSSPVTKSFNR |
| | | GEC |
| 353 | CD28(SA) hu IgG1 | QVQLVQSGAEVKKPGASVKVSCKASGYTFTSYYIHWVRQAPGQGL |
| | VH-CH1 “EE” Fc knob | EWIGCIYPGNVNTNYNEKFKDRATLTVDTSISTAYMELSRLRSDD |
| | PGLALA | TAVYFCTRSHYGLDWNFDVWGQGTTVTVSSASTKGPSVFPLAPSS |
| | | KSTSGGTAALGCLVEDYFPEPVTVSWNSGALTSGVHTFPAVLQSS |
| | | GLYSLSSVVTVPSSSLGTQTYICNVNHKPSNTKVDEKVEPKSCDK |
| | | THTCPPCPAPEAAGGPSVFLFPPKPKDTLMISRTPEVTCVVVDVS |
| | | HEDPEVKFNWYVDGVEVHNAKTKPREEQYNSTYRVVSVLTVLHQD |
| | | WLNGKEYKCKVSNKALGAPIEKTISKAKGQPREPQVYTLPPCRDE |
| | | LTKNQVSLWCLVKGFYPSDIAVEWESNGQPENNYKTTPPVLDSDG |
| | | SFFLYSKLTVDKSRWQQGNVFSCSVMHEALHNHYTQKSLSLSP |
| 354 | CD28(SA) hu IgG1 VL- | DIQMTQSPSSLSASVGDRVTITCHASQNIYVWLNWYQQKPGKAPK |
| | Ck “RK” | LLIYKASNLHTGVPSRFSGSGSGTDFTLTISSLQPEDFATYYCQQ |
| | | GQTYPYTFGGGTKVEIKRTVAAPSVFIFPPSDRKLKSGTASVVCL |
| | | LNNFYPREAKVQWKVDNALQSGNSQESVTEQDSKDSTYSLSSTLT |
| | | LSKADYEKHKVYACEVTHQGLSSPVTKSFNRGEC |
| 355 | CD28(SA_Variant 8) hu | QVQLVQSGAEVKKPGASVKVSCKASGYTFTSYYIHWVRQAPGQGL |
| | IgG1 VH-CH1 “EE” Fc | EWIGSIYPGNVQTNYNEKFKDRATLTVDTSISTAYMELSRLRSDD |
| | knob PGLALA | TAVYFCTRSHYGLDFNFDVWGQGTTVTVSSASTKGPSVFPLAPSS |
| | | KSTSGGTAALGCLVEDYFPEPVTVSWNSGALTSGVHTFPAVLQSS |
| | | GLYSLSSVVTVPSSSLGTQTYICNVNHKPSNTKVDEKVEPKSCDK |
| | | THTCPPCPAPEAAGGPSVFLFPPKPKDTLMISRTPEVTCVVVDVS |
| | | HEDPEVKFNWYVDGVEVHNAKTKPREEQYNSTYRVVSVLTVLHQD |
| | | WLNGKEYKCKVSNKALGAPIEKTISKAKGQPREPQVYTLPPCRDE |
| | | LTKNQVSLWCLVKGFYPSDIAVEWESNGQPENNYKTTPPVLDSDG |
| | | SFFLYSKLTVDKSRWQQGNVFSCSVMHEALHNHYTQKSLSLSP |
| 356 | CD28(SA_Variant 8) hu | DIQMTQSPSSLSASVGDRVTITCHASQNIYVYLNWYQQKPGKAPK |
| | IgG1 VL-Ck “RK” | LLIYKASNLHTGVPSRFSGSGSGTDFTLTISSLQPEDFATYYCQQ |
| | | GQTYPYTFGGGTKVEIKRTVAAPSVFIFPPSDRKLKSGTASVVCL |
| | | LNNFYPREAKVQWKVDNALQSGNSQESVTEQDSKDSTYSLSSTLT |
| | | LSKADYEKHKVYACEVTHQGLSSPVTKSFNRGEC |
| 357 | CD28(SA_Variant 15) | QVQLVQSGAEVKKPGASVKVSCKASGYTFTSYYIHWVRQAPGQGL |
| | hu IgG1 VH-CH1 “EE” | EWIGSIYPGNVQTNYNEKFKDRATLTVDTSISTAYMELSRLRSDD |
| | Fc knob PGLALA | TAVYFCTRSHYGLDWNFDVWGQGTTVTVSSASTKGPSVFPLAPSS |
| | | KSTSGGTAALGCLVEDYFPEPVTVSWNSGALTSGVHTFPAVLQSS |
| | | GLYSLSSVVTVPSSSLGTQTYICNVNHKPSNTKVDEKVEPKSCDK |
| | | THTCPPCPAPEAAGGPSVFLFPPKPKDTLMISRTPEVTCVVVDVS |
| | | HEDPEVKFNWYVDGVEVHNAKTKPREEQYNSTYRVVSVLTVLHQD |
| | | WLNGKEYKCKVSNKALGAPIEKTISKAKGQPREPQVYTLPPCRDE |
| | | LTKNQVSLWCLVKGFYPSDIAVEWESNGQPENNYKTTPPVLDSDG |
| | | SFFLYSKLTVDKSRWQQGNVFSCSVMHEALHNHYTQKSLSLSP |
| 358 | CD28(SA_Variant 15) | DIQMTQSPSSLSASVGDRVTITCHASQNIYVFLNWYQQKPGKAPK |
| | hu IgG1 VL-Ck “RK” | LLIYKASNLHTGVPSRFSGSGSGTDFTLTISSLQPEDFATYYCQQ |
| | | GQTYPYTFGGGTKVEIKRTVAAPSVFIFPPSDRKLKSGTASVVCL |
| | | LNNFYPREAKVQWKVDNALQSGNSQESVTEQDSKDSTYSLSSTLT |
| | | LSKADYEKHKVYACEVTHQGLSSPVTKSFNRGEC |
| 359 | CD28(SA_Variant 29) | QVQLVQSGAEVKKPGASVKVSCKASGYTFTSYYIHWVRQAPGQGL |
| | hu IgG1 VH-CH1 ”EE” | EWIGSIYPGNVNTNYNEKFKDRATLTVDTSISTAYMELSRLRSDD |
| | Fc knob PGLALA | TAVYFCTRSHYGLDWNFDVWGQGTTVTVSSASTKGPSVFPLAPSS |
| | | KSTSGGTAALGCLVEDYFPEPVTVSWNSGALTSGVHTFPAVLQSS |
| | | GLYSLSSVVTVPSSSLGTQTYICNVNHKPSNTKVDEKVEPKSCDK |
| | | THTCPPCPAPEAAGGPSVFLFPPKPKDTLMISRTPEVTCVVVDVS |
| | | HEDPEVKFNWYVDGVEVHNAKTKPREEQYNSTYRVVSVLTVLHQD |
| | | WLNGKEYKCKVSNKALGAPIEKTISKAKGQPREPQVYTLPPCRDE |
| | | LTKNQVSLWCLVKGFYPSDIAVEWESNGQPENNYKTTPPVLDSDG |
| | | SFFLYSKLTVDKSRWQQGNVFSCSVMHEALHNHYTQKSLSLSP |
| 360 | CEA(A5H1EL1D) hu | EVQLLESGGGLVQPGGSLRLSCAASGFTFTDYYMNWVRQAPGKGL |
| | IgG1 VH-CH1 “EE” Fc | EWLGFIGNKANAYTTEYSASVKGRFTISRDKSKNTLYLQMNSLRA |
| | hole PGLALA | EDTATYYCTRDRGLRFYFDYWGQGTTVTVSSASTKGPSVFPLAPS |
| | | SKSTSGGTAALGCLVEDYFPEPVTVSWNSGALTSGVHTFPAVLQS |
| | | SGLYSLSSVVTVPSSSLGTQTYICNVNHKPSNTKVDEKVEPKSCD |
| | | KTHTCPPCPAPEAAGGPSVFLFPPKPKDTLMISRTPEVTCVVVDV |
| | | SHEDPEVKFNWYVDGVEVHNAKTKPREEQYNSTYRVVSVLTVLHQ |
| | | DWLNGKEYKCKVSNKALGAPIEKTISKAKGQPREPQVCTLPPSRD |
| | | ELTKNQVSLSCAVKGFYPSDIAVEWESNGQPENNYKTTPPVLDSD |
| | | GSFFLVSKLTVDKSRWQQGNVFSCSVMHEALHNHYTQKSLSLSP |
| 361 | CEA(A5H1EL1D) hu | EIVLTQSPATLSLSPGERATLSCRASSSVTYIHWYQQKPGQAPRS |
| | IgG1 VL-Ck “RK” | WIYATSNLASGIPARFSGSGSGTDFTLTISSLEPEDFAVYYCQHW |
| | | SSKPPTFGQGTKLEIKRTVAAPSVFIFPPSDRKLKSGTASVVCLL |
| | | NNFYPREAKVQWKVDNALQSGNSQESVTEQDSKDSTYSLSSTLTL |
| | | SKADYEKHKVYACEVTHQGLSSPVTKSFNRGEC |
| 362 | CD28(SA) VL-CH1 hu | DIQMTQSPSSLSASVGDRVTITCHASQNIYVWLNWYQQKPGKAPK |
| | IgG1 Fc knob PGLALA | LLIYKASNLHTGVPSRFSGSGSGTDFTLTISSLQPEDFATYYCQQ |
| | | GQTYPYTFGGGTKVEIKSSASTKGPSVFPLAPSSKSTSGGTAALG |
| | | CLVKDYFPEPVTVSWNSGALTSGVHTFPAVLQSSGLYSLSSVVTV |
| | | PSSSLGTQTYICNVNHKPSNTKVDKKVEPKSCDKTHTCPPCPAPE |
| | | AAGGPSVFLFPPKPKDTLMISRTPEVTCVVVDVSHEDPEVKFNWY |
| | | VDGVEVHNAKTKPREEQYNSTYRVVSVLTVLHQDWLNGKEYKCKV |
| | | SNKALGAPIEKTISKAKGQPREPQVYTLPPCRDELTKNQVSLWCL |
| | | VKGFYPSDIAVEWESNGQPENNYKTTPPVLDSDGSFFLYSKLTVD |
| | | KSRWQQGNVFSCSVMHEALHNHYTQKSLSLSP |
| 363 | CD28(SA) VH-Ckappa | QVQLVQSGAEVKKPGASVKVSCKASGYTFTSYYITHWVRQAPGQGL |
| | | EWIGCIYPGNVNTNYNEKEKDRATLTVDTSISTAYMELSRLRSDD |
| | | TAVYFCTRSHYGLDWNFDVWGQGTTVTVSSASVAAPSVFIFPPSD |
| | | EQLKSGTASVVCLLNNFYPREAKVQWKVDNALQSGNSQESVTEQD |
| | | SKDSTYSLSSTLTLSKADYEKHKVYACEVTHQGLSSPVTKSFNRG |
| | | EC |
| 364 | CD28(SA_Variant 8) | DIQMTQSPSSLSASVGDRVTITCHASQNIYVYLNWYQQKPGKAPK |
| | VL-CH1 hu IgG1 Fc | LLIYKASNLHTGVPSRFSGSGSGTDFTLTISSLQPEDFATYYCQQ |
| | | GQTYPYTFGGGTKVEIKSSASTKGPSVFPLAPSSKSTSGGTAALG |
| | knob PGLALA | CLVKDYFPEPVTVSWNSGALTSGVHTFPAVLQSSGLYSLSSVVTV |
| | | PSSSLGTQTYICNVNHKPSNTKVDKKVEPKSCDKTHTCPPCPAPE |
| | | AAGGPSVFLFPPKPKDTLMISRTPEVTCVVVDVSHEDPEVKFNWY |
| | | VDGVEVHNAKTKPREEQYNSTYRVVSVLTVLHQDWLNGKEYKCKV |
| | | SNKALGAPIEKTISKAKGQPREPQVYTLPPCRDELTKNQVSLWCL |
| | | VKGFYPSDIAVEWESNGQPENNYKTTPPVLDSDGSFFLYSKLTVD |
| | | KSRWQQGNVFSCSVMHEALHNHYTQKSLSLSP |
| 365 | CD28(SA_Variant 8) | QVQLVQSGAEVKKPGASVKVSCKASGYTFTSYYIHWVRQAPGQGL |
| | VH-Ckappa | EWIGSIYPGNVQTNYNEKFKDRATLTVDTSISTAYMELSRLRSDD |
| | | TAVYFCTRSHYGLDFNFDVWGQGTTVTVSSASVAAPSVFIFPPSD |
| | | EQLKSGTASVVCLLNNFYPREAKVQWKVDNALQSGNSQESVTEQD |
| | | SKDSTYSLSSTLTLSKADYEKHKVYACEVTHQGLSSPVTKSFNRG |
| | | EC |
| 366 | CD28(SA_Variant 15) | DIQMTQSPSSLSASVGDRVTITCHASQNIYVFLNWYQQKPGKAPK |
| | VL-CH1 hu IgG1 Fc | LLIYKASNLHTGVPSRFSGSGSGTDFTLTISSLQPEDFATYYCQQ |
| | knob PGLALA | GQTYPYTFGGGTKVEIKSSASTKGPSVFPLAPSSKSTSGGTAALG |
| | | CLVKDYFPEPVTVSWNSGALTSGVHTFPAVLQSSGLYSLSSVVTV |
| | | PSSSLGTQTYICNVNHKPSNTKVDKKVEPKSCDKTHTCPPCPAPE |
| | | AAGGPSVFLFPPKPKDTLMISRTPEVTCVVVDVSHEDPEVKFNWY |
| | | VDGVEVHNAKTKPREEQYNSTYRVVSVLTVLHQDWLNGKEYKCKV |
| | | SNKALGAPIEKTISKAKGQPREPQVYTLPPCRDELTKNQVSLWCL |
| | | VKGFYPSDIAVEWESNGQPENNYKTTPPVLDSDGSFFLYSKLTVD |
| | | KSRWQQGNVFSCSVMHEALHNHYTQKSLSLSP |
| 367 | CD28(SA_Variant 15) | QVQLVQSGAEVKKPGASVKVSCKASGYTFTSYYIHWVRQAPGQGL |
| | VH-Ckappa | EWIGSTYPGNVQTNYNEKFKDRATLTVDTSISTAYMELSRLRSDD |
| | | TAVYFCTRSHYGLDWNFDVWGQGTTVTVSSASVAAPSVFIFPPSD |
| | | EQLKSGTASVVCLLNNFYPREAKVQWKVDNALQSGNSQESVTEQD |
| | | SKDSTYSLSSTLTLSKADYEKHKVYACEVTHQGLSSPVTKSFNRG |
| | | EC |
| 368 | CD28(SA_Variant 29) | QVQLVQSGAEVKKPGASVKVSCKASGYTFTSYYIHWVRQAPGQGL |
| | VH-Ckappa | EWIGSIYPGNVNTNYNEKFKDRATLTVDTSISTAYMELSRLRSDD |
| | | TAVYFCTRSHYGLDWNFDVWGQGTTVTVSSASVAAPSVFIFPPSD |
| | | EQLKSGTASVVCLLNNFYPREAKVQWKVDNALQSGNSQESVTEQD |
| | | SKDSTYSLSSTLTLSKADYEKHKVYACEVTHQGLSSPVTKSFNRG |
| | | EC |
| 369 | CEA(T84.66) VL-CH1 | EIVLTQSPATLSLSPGERATLSCRAGESVDIFGVGFLHWYQQKPG |
| | hu IgG1 Fc hole | QAPRLLIYRASNRATGIPARFSGSGSGTDFTLTISSLEPEDFAVY |
| | PGLALA | YCQQTNEDPYTFGQGTKLEIKSSASTKGPSVFPLAPSSKSTSGGT |
| | | AALGCLVKDYFPEPVTVSWNSGALTSGVHTFPAVLQSSGLYSLSS |
| | | VVTVPSSSLGTQTYICNVNHKPSNTKVDKKVEPKSCDKTHTCPPC |
| | | PAPEAAGGPSVFLFPPKPKDTLMISRTPEVTCVVVDVSHEDPEVK |
| | | FNWYVDGVEVHNAKTKPREEQYNSTYRVVSVLTVLHQDWLNGKEY |
| | | KCKVSNKALGAPIEKTISKAKGQPREPQVCTLPPSRDELTKNQVS |
| | | LSCAVKGFYPSDIAVEWESNGQPENNYKTTPPVLDSDGSFFLVSK |
| | | LTVDKSRWQQGNVFSCSVMHEALHNHYTQKSLSLSP |
| 370 | CEA(T84.66) VH- | QVQLVQSGAEVKKPGSSVKVSCKASGFNIKDTYMHWVRQAPGQGL |
| | Ckappa | EWMGRIDPANGNSKYVPKFQGRVTITADTSTSTAYMELSSLRSED |
| | | TAVYYCAPFGYYVSDYAMAYWGQGTLVTVSSASVAAPSVFIFPPS |
| | | DEQLKSGTASVVCLLNNFYPREAKVQWKVDNALQSGNSQESVTEQ |
| | | DSKDSTYSLSSTLTLSKADYEKHKVYACEVTHQGLSSPVTKSFNR |
| | | GEC |
| 371 | CEA(T84.66) hu IgG1 | QVQLVQSGAEVKKPGSSVKVSCKASGFNIKDTYMHWVRQAPGQGL |
| | VH-CH1 “EE” Fc hole | EWMGRIDPANGNSKYVPKFQGRVTITADTSTSTAYMELSSLRSED |
| | PGLALA | TAVYYCAPFGYYVSDYAMAYWGQGTLVTVSSASTKGPSVFPLAPS |
| | | SKSTSGGTAALGCLVEDYFPEPVTVSWNSGALTSGVHTFPAVLQS |
| | | SGLYSLSSVVTVPSSSLGTQTYICNVNHKPSNTKVDEKVEPKSCD |
| | | KTHTCPPCPAPEAAGGPSVFLFPPKPKDTLMISRTPEVTCVVVDV |
| | | SHEDPEVKFNWYVDGVEVHNAKTKPREEQYNSTYRVVSVLTVLHQ |
| | | DWLNGKEYKCKVSNKALGAPIEKTISKAKGQPREPQVCTLPPSRD |
| | | ELTKNQVSLSCAVKGFYPSDIAVEWESNGQPENNYKTTPPVLDSD |
| | | GSFFLVSKLTVDKSRWQQGNVFSCSVMHEALHNHYTQKSLSLSP |
| 372 | CEA(T84.66) hu IgG1 | EIVLTQSPATLSLSPGERATLSCRAGESVDIFGVGFLHWYQQKPG |
| | VL-Ck “RK” | QAPRLLIYRASNRATGIPARFSGSGSGTDFTLTISSLEPEDFAVY |
| | | YCQQTNEDPYTFGQGTKLEIKRTVAAPSVFIFPPSDRKLKSGTAS |
| | | VVCLLNNFYPREAKVQWKVDNALQSGNSQESVTEQDSKDSTYSLS |
| | | STLTLSKADYEKHKVYACEVTHQGLSSPVTKSFNRGEC |
| 373 | CEA(A5H1EL1D) VH- | EVQLLESGGGLVQPGGSLRLSCAASGFTFTDYYMNWVRQAPGKGL |
| | CH1-VH-CH1 “EE” hu | EWLGFIGNKANAYTTEYSASVKGRFTISRDKSKNTLYLQMNSLRA |
| | IgG1 Fc hole PGLALA | EDTATYYCTRDRGLRFYFDYWGQGTTVTVSSASTKGPSVFPLAPS |
| | | SKSTSGGTAALGCLVEDYFPEPVTVSWNSGALTSGVHTFPAVLQS |
| | | SGLYSLSSVVTVPSSSLGTQTYICNVNHKPSNTKVDEKVEPKSCD |
| | | GGGGSGGGGSEVQLLESGGGLVQPGGSLRLSCAASGFTFTDYYMN |
| | | WVRQAPGKGLEWLGFIGNKANAYTTEYSASVKGRFTISRDKSKNT |
| | | LYLQMNSLRAEDTATYYCTRDRGLRFYFDYWGQGTTVTVSSASTK |
| | | GPSVFPLAPSSKSTSGGTAALGCLVEDYFPEPVTVSWNSGALTSG |
| | | VHTFPAVLQSSGLYSLSSVVTVPSSSLGTQTYICNVNHKPSNTKV |
| | | DEKVEPKSCDKTHTCPPCPAPEAAGGPSVFLFPPKPKDTLMISRT |
| | | PEVTCVVVDVSHEDPEVKFNWYVDGVEVHNAKTKPREEQYNSTYR |
| | | VVSVLTVLHQDWLNGKEYKCKVSNKALGAPIEKTISKAKGQPREP |
| | | QVCTLPPSRDELTKNQVSLSCAVKGFYPSDIAVEWESNGQPENNY |
| | | KTTPPVLDSDGSFFLVSKLTVDKSRWQQGNVFSCSVMHEALHNHY |
| | | TQKSLSLSP |
| 374 | CD28(SA) VL-CH1 | DIQMTQSPSSLSASVGDRVTITCHASQNIYVWLNWYQQKPGKAPK |
| | CEA(A5H1EL1D) VH- | LLIYKASNLHTGVPSRFSGSGSGTDFTLTISSLQPEDFATYYCQQ |
| | CH1 “EE” hu IgG1 Fc | GQTYPYTFGGGTKVEIKSSASTKGPSVFPLAPSSKSTSGGTAALG |
| | knob PGLALA | CLVKDYFPEPVTVSWNSGALTSGVHTFPAVLQSSGLYSLSSVVTV |
| | | PSSSLGTQTYICNVNHKPSNTKVDKKVEPKSCDGGGGSGGGGSEV |
| | | QLLESGGGLVQPGGSLRLSCAASGFTFTDYYMNWVRQAPGKGLEW |
| | | LGFIGNKANAYTTEYSASVKGRFTISRDKSKNTLYLQMNSLRAED |
| | | TATYYCTRDRGLRFYFDYWGQGTTVTVSSASTKGPSVFPLAPSSK |
| | | STSGGTAALGCLVEDYFPEPVTVSWNSGALTSGVHTFPAVLQSSG |
| | | LYSLSSVVTVPSSSLGTQTYICNVNHKPSNTKVDEKVEPKSCDKT |
| | | HTCPPCPAPEAAGGPSVFLFPPKPKDTLMISRTPEVTCVVVDVSH |
| | | EDPEVKFNWYVDGVEVHNAKTKPREEQYNSTYRVVSVLTVLHQDW |
| | | LNGKEYKCKVSNKALGAPIEKTISKAKGQPREPQVYTLPPCRDEL |
| | | TKNQVSLWCLVKGFYPSDIAVEWESNGQPENNYKTTPPVLDSDGS |
| | | FFLYSKLTVDKSRWQQGNVFSCSVMHEALHNHYTQKSLSLSP |
| 375 | CEA(P002.139) VL- | EIVLTQSPATLSLSPGERATLSCRASSSVTYIHWYQQKPGQAPRS |
| | CH1 hu IgG1 Fc hole | WIYATSNLASGIPARFSGSGSGTDFTLTISSLEPEDFAVYYCQHW |
| | PGLALA | SSKPPTFGQGTKLEIKSSASTKGPSVFPLAPSSKSTSGGTAALGC |
| | | LVKDYFPEPVTVSWNSGALTSGVHTFPAVLQSSGLYSLSSVVTVP |
| | | SSSLGTQTYICNVNHKPSNTKVDKKVEPKSCDKTHTCPPCPAPEA |
| | | AGGPSVFLFPPKPKDTLMISRTPEVTCVVVDVSHEDPEVKFNWYV |
| | | DGVEVHNAKTKPREEQYNSTYRVVSVLTVLHQDWLNGKEYKCKVS |
| | | NKALGAPIEKTISKAKGQPREPQVCTLPPSRDELTKNQVSLSCAV |
| | | KGFYPSDIAVEWESNGQPENNYKTTPPVLDSDGSFFLVSKLTVDK |
| | | SRWQQGNVFSCSVMHEALHNHYTQKSLSLSP |
| 376 | CEA(P002.139) VH- | EVQLLESGGGLVQPGGSLRLSCAASGFTFTDYYMNWVRQAPGKGL |
| | Cka ppa | EWLGFIGNKANAYTTEYSASVKGRFTISRDKSKNTLYLQMNSLRA |
| | | EDTATYYCTRDRGLRFYFDYWGQGTTVTVSSASVAAPSVFIFPPS |
| | | DEQLKSGTASVVCLLNNFYPREAKVQWKVDNALQSGNSQESVTEQ |
| | | DSKDSTYSLSSTLTLSKADYEKHKVYACEVTHQGLSSPVTKSFNR |
| | | GEC |
| 377 | CD28 (SA_Variant 8) | DIQMTQSPSSLSASVGDRVTITCHASQNIYVYLNWYQQKPGKAPK |
| | hu IgG1 light chain | LLIYKASNLHTGVPSRFSGSGSGTDFTLTISSLQPEDFATYYCQQ |
| | | GQTYPYTFGGGTKVEIKRTVAAPSVFIFPPSDEQLKSGTASVVCL |
| | | LNNFYPREAKVQWKVDNALQSGNSQESVTEQDSKDSTYSLSSTLT |
| | | LSKADYEKHKVYACEVTHQGLSSPVTKSFNRGEC |
| 378 | CD28(SA_Variant 8) hu | QVQLVQSGAEVKKPGASVKVSCKASGYTFTSYYIHWVRQAPGQGL |
| | IgG1 PGLALA heavy | EWIGSIYPGNVQTNYNEKFKDRATLTVDTSISTAYMELSRLRSDD |
| | chain | TAVYFCTRSHYGLDFNFDVWGQGTTVTVSSASTKGPSVFPLAPSS |
| | | KSTSGGTAALGCLVKDYFPEPVTVSWNSGALTSGVHTFPAVLQSS |
| | | GLYSLSSVVTVPSSSLGTQTYICNVNHKPSNTKVDKKVEPKSCDK |
| | | THTCPPCPAPEAAGGPSVFLFPPKPKDTLMISRTPEVTCVVVDVS |
| | | HEDPEVKFNWYVDGVEVHNAKTKPREEQYNSTYRVVSVLTVLHQD |
| | | WLNGKEYKCKVSNKALGAPIEKTISKAKGQPREPQVYTLPPSRDE |
| | | LTKNQVSLTCLVKGFYPSDIAVEWESNGQPENNYKTTPPVLDSDG |
| | | SFFLYSKLTVDKSRWQQGNVFSCSVMHEALHNHYTQKSLSLSP |
| 379 | CD28 (SA_Variant 11) | DIQMTQSPSSLSASVGDRVTITCHASQNIYVWLNWYQQKPGKAPK |
| | hu IgG1 light chain | LLIYKASNLHTGVPSRFSGSGSGTDFTLTISSLQPEDFATYYCQQ |
| | | GQTYPYTFGGGTKVEIKRTVAAPSVFIFPPSDEQLKSGTASVVCL |
| | | LNNFYPREAKVQWKVDNALQSGNSQESVTEQDSKDSTYSLSSTLT |
| | | LSKADYEKHKVYACEVTHQGLSSPVTKSFNRGEC |
| 380 | CD28(SA_Variant 11) | QVQLVQSGAEVKKPGASVKVSCKASGYTFTSYYIHWVRQAPGQGL |
| | hu IgG1 PGLALA | EWIGSIYPGNVQTNYNEKFKDRATLTVDTSISTAYMELSRLRSDD |
| | heavy chain | TAVYFCTRSHYGLDFNFDVWGQGTTVTVSSASTKGPSVFPLAPSS |
| | | KSTSGGTAALGCLVKDYFPEPVTVSWNSGALTSGVHTFPAVLQSS |
| | | GLYSLSSVVTVPSSSLGTQTYICNVNHKPSNTKVDKKVEPKSCDK |
| | | THTCPPCPAPEAAGGPSVFLFPPKPKDTLMISRTPEVTCVVVDVS |
| | | HEDPEVKFNWYVDGVEVHNAKTKPREEQYNSTYRVVSVLTVLHQD |
| | | WLNGKEYKCKVSNKALGAPIEKTISKAKGQPREPQVYTLPPSRDE |
| | | LTKNQVSLTCLVKGFYPSDIAVEWESNGQPENNYKTTPPVLDSDG |
| | | SFFLYSKLTVDKSRWQQGNVFSCSVMHEALHNHYTQKSLSLSP |
| 381 | CD28 (SA_Variant 15) | DIQMTQSPSSLSASVGDRVTITCHASQNIYVFLNWYQQKPGKAPK |
| | hu IgG1 light chain | LLIYKASNLHTGVPSRFSGSGSGTDFTLTISSLQPEDFATYYCQQ |
| | | GQTYPYTFGGGTKVEIKRTVAAPSVFIFPPSDEQLKSGTASVVCL |
| | | LNNFYPREAKVQWKVDNALQSGNSQESVTEQDSKDSTYSLSSTLT |
| | | LSKADYEKHKVYACEVTHQGLSSPVTKSFNRGEC |
| 382 | CD28(SA_Variant 15) | QVQLVQSGAEVKKPGASVKVSCKASGYTFTSYYIHWVRQAPGQGL |
| | hu IgG1 PGLALA | EWIGSIYPGNVQTNYNEKFKDRATLTVDTSISTAYMELSRLRSDD |
| | heavy chain | TAVYFCTRSHYGLDWNFDVWGQGTTVTVSSASTKGPSVFPLAPSS |
| | | KSTSGGTAALGCLVKDYFPEPVTVSWNSGALTSGVHTFPAVLQSS |
| | | GLYSLSSVVTVPSSSLGTQTYICNVNHKPSNTKVDKKVEPKSCDK |
| | | THTCPPCPAPEAAGGPSVFLFPPKPKDTLMISRTPEVTCVVVDVS |
| | | HEDPEVKFNWYVDGVEVHNAKTKPREEQYNSTYRVVSVLTVLHQD |
| | | WLNGKEYKCKVSNKALGAPIEKTISKAKGQPREPQVYTLPPSRDE |
| | | LTKNQVSLTCLVKGFYPSDIAVEWESNGQPENNYKTTPPVLDSDG |
| | | SFFLYSKLTVDKSRWQQGNVFSCSVMHEALHNHYTQKSLSLSP |
| 383 | CD28 (SA_Variant 27) | DIQMTQSPSSLSASVGDRVTITCHASQGIYVYLNWYQQKPGKAPK |
| | hu IgG1 light chain | LLIYKASNLHTGVPSRFSGSGSGTDFTLTISSLQPEDFATYYCQQ |
| | | GQTYPYTFGGGTKVEIKRTVAAPSVFIFPPSDEQLKSGTASVVCL |
| | | LNNFYPREAKVQWKVDNALQSGNSQESVTEQDSKDSTYSLSSTLT |
| | | LSKADYEKHKVYACEVTHQGLSSPVTKSFNRGEC |
| 384 | CD28(SA_Variant 27) | QVQLVQSGAEVKKPGASVKVSCKASGYTFTSYYIHWVRQAPGQGL |
| | hu IgG1 PGLALA | EWIGSIYPGNVNTNYNEKFKDRATLTVDTSISTAYMELSRLRSDD |
| | heavy chain | TAVYFCTRSHYGLDWNFDVWGQGTTVTVSSASTKGPSVFPLAPSS |
| | | KSTSGGTAALGCLVKDYFPEPVTVSWNSGALTSGVHTFPAVLQSS |
| | | GLYSLSSVVTVPSSSLGTQTYICNVNHKPSNTKVDKKVEPKSCDK |
| | | THTCPPCPAPEAAGGPSVFLFPPKPKDTLMISRTPEVTCVVVDVS |
| | | HEDPEVKFNWYVDGVEVHNAKTKPREEQYNSTYRVVSVLTVLHQD |
| | | WLNGKEYKCKVSNKALGAPIEKTISKAKGQPREPQVYTLPPSRDE |
| | | LTKNQVSLTCLVKGFYPSDIAVEWESNGQPENNYKTTPPVLDSDG |
| | | SFFLYSKLTVDKSRWQQGNVFSCSVMHEALHNHYTQKSLSLSP |
| 385 | CD28 (SA_Variant 29) | DIQMTQSPSSLSASVGDRVTITCHASQNIYVWLNWYQQKPGKAPK |
| | hu IgG1 light chain | LLIYKASNLHTGVPSRFSGSGSGTDFTLTISSLQPEDFATYYCQQ |
| | | GQTYPYTFGGGTKVEIKRTVAAPSVFIFPPSDEQLKSGTASVVCL |
| | | LNNFYPREAKVQWKVDNALQSGNSQESVTEQDSKDSTYSLSSTLT |
| | | LSKADYEKHKVYACEVTHQGLSSPVTKSFNRGEC |
| 386 | CD28(SA_Variant 29) | QVQLVQSGAEVKKPGASVKVSCKASGYTFTSYYIHWVRQAPGQGL |
| | hu IgG1 PGLALA | EWIGSIYPGNVNTNYNEKFKDRATLTVDTSISTAYMELSRLRSDD |
| | heavy chain | TAVYFCTRSHYGLDWNFDVWGQGTTVTVSSASTKGPSVFPLAPSS |
| | | KSTSGGTAALGCLVKDYFPEPVTVSWNSGALTSGVHTFPAVLQSS |
| | | GLYSLSSVVTVPSSSLGTQTYICNVNHKPSNTKVDKKVEPKSCDK |
| | | THTCPPCPAPEAAGGPSVFLFPPKPKDTLMISRTPEVTCVVVDVS |
| | | HEDPEVKFNWYVDGVEVHNAKTKPREEQYNSTYRVVSVLTVLHQD |
| | | WLNGKEYKCKVSNKALGAPIEKTISKAKGQPREPQVYTLPPSRDE |
| | | LTKNQVSLTCLVKGFYPSDIAVEWESNGQPENNYKTTPPVLDSDG |
| | | SFFLYSKLTVDKSRWQQGNVFSCSVMHEALHNHYTQKSLSLSP |
| 387 | Avi tag | GLNDIFEAQKIEWHE |
| 388 | CD28 VEICH1 “EE”- | QVQLVQSGAEVKKPGASVKVSCKASGYTFTSYYIHWVRQAPGQGL |
| | (G4S)₂- FAP(4B9)- | EWIGCIYPGNVNTNYNEKFKDRATLTVDTSISTAYMELSRLRSDD |
| | VHCH1 “EE” - Fc | TAVYFCTRSHYGLDWNFDVWGQGTTVTVSSASTKGPSVFPLAPSS |
| | knob PGLALA | KSTSGGTAALGCLVEDYFPEPVTVSWNSGALTSGVHTFPAVLQSS |
| | | GLYSLSSVVTVPSSSLGTQTYICNVNHKPSNTKVDEKVEPKSCDG |
| | | GGGSGGGGSEVQLLESGGGLVQPGGSLRLSCAASGFTFSSYAMSW |
| | | VRQAPGKGLEWVSAIIGSGASTYYADSVKGRFTISRDNSKNTLYL |
| | | QMNSLRAEDTAVYYCAKGWFGGFNYWGQGTLVTVSSASTKGPSVF |
| | | PLAPSSKSTSGGTAALGCLVEDYFPEPVTVSWNSGALTSGVHTFP |
| | | AVLQSSGLYSLSSVVTVPSSSLGTQTYICNVNHKPSNTKVDEKVE |
| | | PKSCDKTHTCPPCPAPEAAGGPSVFLFPPKPKDTLMISRTPEVTC |
| | | VVVDVSHEDPEVKFNWYVDGVEVHNAKTKPREEQYNSTYRVVSVL |
| | | TVLHQDWLNGKEYKCKVSNKALGAPIEKTISKAKGQPREPQVYTL |
| | | PPCRDELTKNQVSLWCLVKGFYPSDIAVEWESNGQPENNYKTTPP |
| | | VLDSDGSFFLYSKLTVDKSRWQQGNVFSCSVMHEALHNHYTQKSL |
| | | SLSP |
| 389 | CD28 VLCL “RK”- | DIQMTQSPSSLSASVGDRVTITCHASQNIYVWLNWYQQKPGKAPK |
| | (G4S)₂- FAP(4B9)- | LLIYKASNLHTGVPSRFSGSGSGTDFTLTISSLQPEDFATYYCQQ |
| | VLCL “RK” | GQTYPYTFGGGTKVEIKRTVAAPSVFIFPPSDRKLKSGTASVVCL |
| | | LNNFYPREAKVQWKVDNALQSGNSQESVTEQDSKDSTYSLSSTLT |
| | | LSKADYEKHKVYACEVTHQGLSSPVTKSFNRGECGGGGSGGGGSE |
| | | IVLTQSPGTLSLSPGERATLSCRASQSVTSSYLAWYQQKPGQAPR |
| | | LLINVGSRRATGIPDRFSGSGSGTDFTLTISRLEPEDFAVYYCQQ |
| | | GIMLPPTFGQGTKVEIKRTVAAPSVFIFPPSDRKLKSGTASVVCL |
| | | LNNFYPREAKVQWKVDNALQSGNSQESVTEQDSKDSTYSLSSTLT |
| | | LSKADYEKHKVYACEVTHQGLSSPVTKSFNRGEC |
| 390 | EpCAM(MT201) hu | EVQLLESGGGVVQPGRSLRLSCAASGFTFSSYGMHWVRQAPGKGL |
| | IgG1 VH-CH1 “EE” Fc | EWVAVISYDGSNKYYADSVKGRFTISRDNSKNTLYLQMNSLRAED |
| | hole PGLALA | TAVYYCAKDMGWGSGWRPYYYYGMDVWGQGTTVTVSSASTKGPSV |
| | | FPLAPSSKSTSGGTAALGCLVEDYFPEPVTVSWNSGALTSGVHTF |
| | | PAVLQSSGLYSLSSVVTVPSSSLGTQTYICNVNHKPSNTKVDEKV |
| | | EPKSCDKTHTCPPCPAPEAAGGPSVFLFPPKPKDTLMISRTPEVT |
| | | CVVVDVSHEDPEVKFNWYVDGVEVHNAKTKPREEQYNSTYRVVSV |
| | | LTVLHQDWLNGKEYKCKVSNKALGAPIEKTISKAKGQPREPQVCT |
| | | LPPSRDELTKNQVSLSCAVKGFYPSDIAVEWESNGQPENNYKTTP |
| | | PVLDSDGSFFLVSKLTVDKSRWQQGNVFSCSVMHEALHNHYTQKS |
| | | LSLSP |
| 391 | EpCAM(MT201) VL- | ELQMTQSPSSLSASVGDRVTITCRTSQSISSYLNWYQQKPGQPPK |
| | Ckappa “RK” | LLIYWASTRESGVPDRFSGSGSGTDFTLTISSLQPEDSATYYCQQ |
| | | SYDIPYTFGQGTKLEIKRTVAAPSVFIFPPSDRKLKSGTASVVCL |
| | | LNNFYPREAKVQWKVDNALQSGNSQESVTEQDSKDSTYSLSSTLT |
| | | LSKADYEKHKVYACEVTHQGLSSPVTKSFNRGEC |
| 392 | Her3 VL-CH1 hu IgG1 | DIVMTQSPDSLAVSLGERATINCKSSQSVLNSGNQKNYLTWYQQK |
| | Fc hole PGLALA | PGQPPKLLIYWASTRESGVPDRFSGSGSGTDFTLTISSLQAEDVA |
| | | VYYCQSDYSYPYTFGQGTKLEIKSSASTKGPSVFPLAPSSKSTSG |
| | | GTAALGCLVKDYFPEPVTVSWNSGALTSGVHTFPAVLQSSGLYSL |
| | | SSVVTVPSSSLGTQTYICNVNHKPSNTKVDKKVEPKSCDKTHTCP |
| | | PCPAPEAAGGPSVFLFPPKPKDTLMISRTPEVTCVVVDVSHEDPE |
| | | VKFNWYVDGVEVHNAKTKPREEQYNSTYRVVSVLTVLHQDWLNGK |
| | | EYKCKVSNKALGAPIEKTISKAKGQPREPQVCTLPPSRDELTKNQ |
| | | VSLSCAVKGFYPSDIAVEWESNGQPENNYKTTPPVLDSDGSFFLV |
| | | SKLTVDKSRWQQGNVFSCSVMHEALHNHYTQKSLSLSP |
| 393 | HER3 VH-Ckappa | QVQLVQSGAEVKKPGASVKVSCKASGYTFRSSYISWVRQAPGQGL |
| | | EWMGWIYAGTGSPSYNQKLQGRVTMTTDTSTSTAYMELRSLRSDD |
| | | TAVYYCARHRDYYSNSLTYWGQGTLVTVSSASVAAPSVFIFPPSD |
| | | EQLKSGTASVVCLLNNFYPREAKVQWKVDNALQSGNSQESVTEQD |
| | | SKDSTYSLSSTLTLSKADYEKHKVYACEVTHQGLSSPVTKSFNRG |
| | | EC |
| 394 | CD30 VL-CH1 hu IgG1 | DIVLTQSPASLAVSLGQRATISCKASQSVDFDGDSYMNWYQQKPG |
| | Fc hole PGLALA | QPPKVLIYAASNLESGIPARFSGSGSGTDFTLNIHPVEEEDAATY |
| | | YCQQSNEDPWTFGGGTKLEIKSSASTKGPSVFPLAPSSKSTSGGT |
| | | AALGCLVKDYFPEPVTVSWNSGALTSGVHTFPAVLQSSGLYSLSS |
| | | VVTVPSSSLGTQTYICNVNHKPSNTKVDKKVEPKSCDKTHTCPPC |
| | | PAPEAAGGPSVFLFPPKPKDTLMISRTPEVTCVVVDVSHEDPEVK |
| | | FNWYVDGVEVHNAKTKPREEQYNSTYRVVSVLTVLHQDWLNGKEY |
| | | KCKVSNKALGAPIEKTISKAKGQPREPQVCTLPPSRDELTKNQVS |
| | | LSCAVKGFYPSDIAVEWESNGQPENNYKTTPPVLDSDGSFFLVSK |
| | | LTVDKSRWQQGNVFSCSVMHEALHNHYTQKSLSLSP |
| 395 | CD30 VH-Ckappa | QTQLQQSGPEVVKPGASVKISCKASGYTFTDYYTTWVKQKPGQGL |
| | | EWIGWIYPGSGNTKYNEKFKGKATLTVDTSSSTAFMQLSSLTSED |
| | | TAVYFCANYGNYWFAYWGQGTQVTVSAASVAAPSVFIFPPSDEQL |
| | | KSGTASVVCLLNNFYPREAKVQWKVDNALQSGNSQESVTEQDSKD |
| | | STYSLSSTLTLSKADYEKHKVYACEVTHQGLSSPVTKSFNRGEC |
| 396 | TPBG VL-CH1 hu | DIQMTQSPSSLSASVGDRVTITCQASQDISNYLNWYQQKPGKAPK |
| | IgG1 Fc hole PGLALA | LLIYAASTLQIGVPSRFSGSGSGTDFTFTISSLQPEDFATYYCQQ |
| | | ANSFPLTFGGGTKVEIKSSASTKGPSVFPLAPSSKSTSGGTAALG |
| | | CLVKDYFPEPVTVSWNSGALTSGVHTFPAVLQSSGLYSLSSVVTV |
| | | PSSSLGTQTYICNVNHKPSNTKVDKKVEPKSCDKTHTCPPCPAPE |
| | | AAGGPSVFLFPPKPKDTLMISRTPEVTCVVVDVSHEDPEVKFNWY |
| | | VDGVEVHNAKTKPREEQYNSTYRVVSVLTVLHQDWLNGKEYKCKV |
| | | SNKALGAPIEKTISKAKGQPREPQVCTLPPSRDELTKNQVSLSCA |
| | | VKGFYPSDIAVEWESNGQPENNYKTTPPVLDSDGSFFLVSKLTVD |
| | | KSRWQQGNVFSCSVMHEALHNHYTQKSLSLSP |
| 397 | TPBG VH-Ckappa | EVHLLESGGGLVHPGGSLRLSCAASGFTFRSDAMHWVRQAPGKGL |
| | | EWVSGVSGSGGSPYYADSVKGRFTISRDDSKTTLYLQMNSLRAED |
| | | TAVYYCATGGSIAGSYYYYPMDVWGQGTTVTVSSASVAAPSVFIF |
| | | PPSDEQLKSGTASVVCLLNNFYPREAKVQWKVDNALQSGNSQESV |
| | | TEQDSKDSTYSLSSTLTLSKADYEKHKVYACEVTHQGLSSPVTKS |
| | | FNRGEC |
| 398 | GPRC5D (5E11) hu | EVQLLESGGGLVQPGGSLRLSCAASGFTFSKYAMAWVRQAPGKGL |
| | IgG1 VH-CH1 “EE” Fc | EWVASISTGGVNTYYADSVKGRFTISRDNSKNTLYLQMNSLRAED |
| | hole PGLALA | TAVYYCATHTGDYFDYWGQGTMVTVSSASTKGPSVFPLAPSSKST |
| | | SGGTAALGCLVEDYFPEPVTVSWNSGALTSGVHTFPAVLQSSGLY |
| | | SLSSVVTVPSSSLGTQTYICNVNHKPSNTKVDEKVEPKSCDKTHT |
| | | CPPCPAPEAAGGPSVFLFPPKPKDTLMISRTPEVTCVVVDVSHED |
| | | PEVKFNWYVDGVEVHNAKTKPREEQYNSTYRVVSVLTVLHQDWLN |
| | | GKEYKCKVSNKALGAPIEKTISKAKGQPREPQVCTLPPSRDELTK |
| | | NQVSLSCAVKGFYPSDIAVEWESNGQPENNYKTTPPVLDSDGSFF |
| | | LVSKLTVDKSRWQQGNVFSCSVMHEALHNHYTQKSLSLSP |
| 399 | GPRC5D (5E11)VL- | EIVLTQSPGTLSLSPGERATLSCRASQSVSISGINLMNWYQQKPG |
| | Ckappa “RK” | QQPKLLIYHASILASGIPDRFSGSGSGTDFTLTISRLEPEDFAVY |
| | | YCQQTRESPLTFGQGTRLEIKRTVAAPSVFIFPPSDRKLKSGTAS |
| | | VVCLLNNFYPREAKVQWKVDNALQSGNSQESVTEQDSKDSTYSLS |
| | | STLTLSKADYEKHKVYACEVTHQGLSSPVTKSFNRGEC |
| 400 | CD38 VL-CH1 hu IgG1 | EIVLTQSPATLSLSPGERATLSCRASQSVSSYLAWYQQKPGQAPR |
| | Fc hole PGLALA | LLIYDASNRATGIPARFSGSGSGTDFTLTISSLEPEDFAVYYCQQ |
| | | RSNWPPTFGQGTKVEIKSSASTKGPSVFPLAPSSKSTSGGTAALG |
| | | CLVKDYFPEPVTVSWNSGALTSGVHTFPAVLQSSGLYSLSSVVTV |
| | | PSSSLGTQTYICNVNHKPSNTKVDKKVEPKSCDKTHTCPPCPAPE |
| | | AAGGPSVFLFPPKPKDTLMISRTPEVTCVVVDVSHEDPEVKFNWY |
| | | VDGVEVHNAKTKPREEQYNSTYRVVSVLTVLHQDWLNGKEYKCKV |
| | | SNKALGAPIEKTISKAKGQPREPQVCTLPPSRDELTKNQVSLSCA |
| | | VKGFYPSDIAVEWESNGQPENNYKTTPPVLDSDGSFFLVSKLTVD |
| | | KSRWQQGNVFSCSVMHEALHNHYTQKSLSLSP |
| 401 | CD38 VH-Ckappa | EVQLLESGGGLVQPGGSLRLSCAVSGFTFNSFAMSWVRQAPGKGL |
| | | EWVSAISGSGGGTYYADSVKGRFTISRDNSKNTLYLQMNSLRAED |
| | | TAVYFCAKDKILWFGEPVFDYWGQGTLVTVSSASVAAPSVFIFPP |
| | | SDEQLKSGTASVVCLLNNFYPREAKVQWKVDNALQSGNSQESVTE |
| | | QDSKDSTYSLSSTLTLSKADYEKHKVYACEVTHQGLSSPVTKSFN |
| | | RGEC |
| 402 | BCMA hu IgG1 VH- | EVQLLESGGGLVQPGGSLRLSCAASGFTFSSYAMNWVRQAPGKGL |
| | CH1 “EE” Fc hole | EWVSAITASGGSTYYADSVKGRFTISRDNSKNTLYLQMNSLRAED |
| | PGLALA | TAVYYCARYWPMSLWGQGTLVTVSSASTKGPSVFPLAPSSKSTSG |
| | | GTAALGCLVEDYFPEPVTVSWNSGALTSGVHTFPAVLQSSGLYSL |
| | | SSVVTVPSSSLGTQTYICNVNHKPSNTKVDEKVEPKSCDKTHTCP |
| | | PCPAPEAAGGPSVFLFPPKPKDTLMISRTPEVTCVVVDVSHEDPE |
| | | VKFNWYVDGVEVHNAKTKPREEQYNSTYRVVSVLTVLHQDWLNGK |
| | | EYKCKVSNKALGAPIEKTISKAKGQPREPQVCTLPPSRDELTKNQ |
| | | VSLSCAVKGFYPSDIAVEWESNGQPENNYKTTPPVLDSDGSFFLV |
| | | SKLTVDKSRWQQGNVFSCSVMHEALHNHYTQKSLSLSP |
| 403 | BCMA VL-Ckappa | EIVLTQSPGTLSLSPGERATLSCRASQSVSAYYLAWYQQKPGQAP |
| | “RK” | RLLMYDASIRATGIPDRFSGSGSGTDFTLTISRLEPEDFAVYYCQ |
| | | QYERWPLTFGQGTKVEIKRTVAAPSVFIFPPSDRKLKSGTASVVC |
| | | LLNNFYPREAKVQWKVDNALQSGNSQESVTEQDSKDSTYSLSSTL |
| | | TLSKADYEKHKVYACEVTHQGLSSPVTKSFNRGEC |
| 404 | GPRC5D (5E11) VH- | EVQLLESGGGLVQPGGSLRLSCAASGFTFSKYAMAWVRQAPGKGL |
| | CH1(EE)-CD3 VL-CH1- | EWVASISTGGVNTYYADSVKGRFTISRDNSKNTLYLQMNSLRAED |
| | Fc (knob, P329GLALA) | TAVYYCATHTGDYFDYWGQGTMVTVSSASTKGPSVFPLAPSSKST |
| | (GPRC5D TCB) | SGGTAALGCLVEDYFPEPVTVSWNSGALTSGVHTFPAVLQSSGLY |
| | | SLSSVVTVPSSSLGTQTYICNVNHKPSNTKVDEKVEPKSCDGGGG |
| | | SGGGGSQAVVTQEPSLTVSPGGTVTLTCGSSTGAVTTSNYANWVQ |
| | | EKPGQAFRGLIGGTNKRAPGTPARFSGSLLGGKAALTLSGAQPED |
| | | EAEYYCALWYSNLWVFGGGTKLTVLSSASTKGPSVFPLAPSSKST |
| | | SGGTAALGCLVKDYFPEPVTVSWNSGALTSGVHTFPAVLQSSGLY |
| | | SLSSVVTVPSSSLGTQTYICNVNHKPSNTKVDKKVEPKSCDKTHT |
| | | CPPCPAPEAAGGPSVFLFPPKPKDTLMISRTPEVTCVVVDVSHED |
| | | PEVKFNWYVDGVEVHNAKTKPREEQYNSTYRVVSVLTVLHQDWLN |
| | | GKEYKCKVSNKALGAPIEKTISKAKGQPREPQVYTLPPCRDELTK |
| | | NQVSLWCLVKGFYPSDIAVEWESNGQPENNYKTTPPVLDSDGSFF |
| | | LYSKLTVDKSRWQQGNVFSCSVMHEALHNHYTQKSLSLSP |
| 405 | CD3 VH-CL (GPRC5D | EVQLLESGGGLVQPGGSLRLSCAASGFQFSSYAMNWVRQAPGKGL |
| | TCB) | EWVSRIRSKYNNYATYYADSVKGRFTISRDDSKNTLYLQMNSLRA |
| | | EDTAVYYCVRHTTFPSSYVSYYGYWGQGTLVTVSSASVAAPSVFI |
| | | FPPSDEQLKSGTASVVCLLNNFYPREAKVQWKVDNALQSGNSQES |
| | | VTEQDSKDSTYSLSSTLTLSKADYEKHKVYACEVTHQGLSSPVTK |
| | | SFNRGEC |
| 406 | CD19 (8B8-2B11) | DYIMH |
| | CDR-H1 | |
| 407 | CD19 (8B8-2B11) | YINPYNDGSKYTEKFQG |
| | CDR-H2 | |
| 408 | CD19 (8B8-2B11) | GTYYYGPQLFDY |
| | CDR-H3 | |
| 409 | CD19 (8B8-2B11) | KSSQSLETSTGTTYLN |
| | CDR-L1 | |
| 410 | CD19 (8B8-2B11) | RVSKRFS |
| | CDR-L2 | |
| 411 | CD19 (8B8-2B11) | LQLLEDPYT |
| | CDR-L3 | |
| 412 | CD19 (8B8-2B11) VH | QVQLVQSGAEVKKPGASVKVSCKASGYTFTDYIMHWVRQAPGQGL |
| | | EWMGYINPYNDGSKYTEKFQGRVTMTSDTSISTAYMELSRLRSDD |
| | | TAVYYCARGTYYYGPQLFDYWGQGTTVTVSS |
| 413 | CD19 (8B8-2B11) VL | DIVMTQTPLSLSVTPGQPASISCKSSQSLETSTGTTYLNWYLQKP |
| | | GQSPQLLIYRVSKRFSGVPDRFSGSGSGTDFTLKISRVEAEDVGV |
| | | YYCLQLLEDPYTFGQGTKLEIK |
| 414 | CD19 (8B8-018) CDR- | DYIMH |
| | H1 | |
| 415 | CD19 (8B8-018) CDR- | YINPYNDGSKYTEKFQG |
| | H2 | |
| 416 | CD19 (8B8-018) CDR- | GTYYYGSALFDY |
| | H3 | |
| 417 | CD19 (8B8-018) CDR- | KSSQSLENPNGNTYLN |
| | L1 | |
| 418 | CD19 (8B8-018) CDR- | RVSKRFS |
| | L2 | |
| 419 | CD19 (8B8-018) CDR- | LQLTHVPYT |
| | L3 | |
| 420 | CD19 (8B8-018) VH | QVQLVQSGAEVKKPGASVKVSCKASGYTFTDYIMHWVRQAPGQGL |
| | | EWMGYINPYNDGSKYTEKFQGRVTMTSDTSISTAYMELSRLRSDD |
| | | TAVYYCARGTYYYGSALFDYWGQGTTVTVSS |
| 421 | CD19 (8B8-018) VL | DIVMTQTPLSLSVTPGQPASISCKSSQSLENPNGNTYLNWYLQKP |
| | | GQSPQLLIYRVSKRFSGVPDRFSGSGSGTDFTLKISRVEAEDVGV |
| | | YYCLQLTHVPYTFGQGTKLEIK |
| 422 | CD79b (huMA79b.v28) | SYWIE |
| | CDR-H1 | |
| 423 | CD79b (huMA79b.v28) | EILPGGGDTNYNEIFKG |
| | CDR-H2 | |
| 424 | CD79b (huMA79b.v28) | RVPIRLDY |
| | CDR-H3 | |
| 425 | CD79b (huMA79b.v28) | KASQSVDYEGDSFLN |
| | CDR-L1 | |
| 426 | CD79b (huMA79b.v28) | AASNLES |
| | CDR-L2 | |
| 427 | CD79b (huMA79b.v28) | QQSNEDPLT |
| | CDR-L3 | |
| 428 | CD79b (huMA79b.v28) | EVQLVESGGGLVQPGGSLRLSCAASGYTFSSYWIEWVRQAPGKGL |
| | VH | EWIGEILPGGGDTNYNEIFKGRATFSADTSKNTAYLQMNSLRAED |
| | | TAVYYCTRRVPIRLDYWGQGTLVTVSS |
| 429 | CD79b (huMA79b.v28) | DIQLTQSPSSLSASVGDRVTITCKASQSVDYEGDSFLNWYQQKPG |
| | VL | KAPKLLIYAASNLESGVPSRFSGSGSGTDFTLTISSLQPEDFATY |
| | | YCQQSNEDPLTFGQGTKVEIK |
| 430 | VL (CD19 2B11) -CH1 | DIVMTQTPLSLSVTPGQPASISCKSSQSLETSTGTTYLNWYLQKP |
| | Fc hole PGLALA | GQSPQLLIYRVSKRFSGVPDRFSGSGSGTDFTLKISRVEAEDVGV |
| | | YYCLQLLEDPYTFGQGTKLEIKSSASTKGPSVFPLAPSSKSTSGG |
| | | TAALGCLVKDYFPEPVTVSWNSGALTSGVHTFPAVLQSSGLYSLS |
| | | SVVTVPSSSLGTQTYICNVNHKPSNTKVDKKVEPKSCDKTHTCPP |
| | | CPAPEAAGGPSVFLFPPKPKDTLMISRTPEVTCVVVDVSHEDPEV |
| | | KFNWYVDGVEVHNAKTKPREEQYNSTYRVVSVLTVLHQDWLNGKE |
| | | YKCKVSNKALGAPIEKTISKAKGQPREPQVCTLPPSRDELTKNQV |
| | | SLSCAVKGFYPSDIAVEWESNGQPENNYKTTPPVLDSDGSFFLVS |
| | | KLTVDKSRWQQGNVFSCSVMHEALHNHYTQKSLSLSP |
| 431 | VH (CD19 2B11) CL | QVQLVQSGAEVKKPGASVKVSCKASGYTFTDYIMHWVRQAPGQGL |
| | | EWMGYINPYNDGSKYTEKFQGRVTMTSDTSISTAYMELSRLRSDD |
| | | TAVYYCARGTYYYGPQLFDYWGQGTTVTVSSASVAAPSVFIFPPS |
| | | DEQLKSGTASVVCLLNNFYPREAKVQWKVDNALQSGNSQESVTEQ |
| | | DSKDSTYSLSSTLTLSKADYEKHKVYACEVTHQGLSSPVTKSFNR |
| | | GEC |
| 432 | VL (huMA79b.v28) - | DIQLTQSPSSLSASVGDRVTITCKASQSVDYEGDSFLNWYQQKPG |
| | CH1 Fc hole PGLALA | KAPKLLIYAASNLESGVPSRFSGSGSGTDFTLTISSLQPEDFATY |
| | | YCQQSNEDPLTFGQGTKVEIKSSASTKGPSVFPLAPSSKSTSGGT |
| | | AALGCLVKDYFPEPVTVSWNSGALTSGVHTFPAVLQSSGLYSLSS |
| | | VVTVPSSSLGTQTYICNVNHKPSNTKVDKKVEPKSCDKTHTCPPC |
| | | PAPEAAGGPSVFLFPPKPKDTLMISRTPEVTCVVVDVSHEDPEVK |
| | | FNWYVDGVEVHNAKTKPREEQYNSTYRVVSVLTVLHQDWLNGKEY |
| | | KCKVSNKALGAPIEKTISKAKGQPREPQVCTLPPSRDELTKNQVS |
| | | LSCAVKGFYPSDIAVEWESNGQPENNYKTTPPVLDSDGSFFLVSK |
| | | LTVDKSRWQQGNVFSCSVMHEALHNHYTQKSLSLSP |
| 433 | VH (huMA79b.v28) CL | EVQLVESGGGLVQPGGSLRLSCAASGYTFSSYWIEWVRQAPGKGL |
| | | EWIGEILPGGGDTNYNEIFKGRATFSADTSKNTAYLQMNSLRAED |
| | | TAVYYCTRRVPIRLDYWGQGTLVTVSSASVAAPSVFIFPPSDEQL |
| | | KSGTASVVCLLNNFYPREAKVQWKVDNALQSGNSQESVTEQDSKD |
| | | STYSLSSTLTLSKADYEKHKVYACEVTHQGLSSPVTKSFNRGEC |
| 434 | Human CD19 | UniProt accession No. P15391 |
| 435 | Human CD79b | UniProt accession No. P40259 |
| 436 | Human CD20 | UniProt accession No. P11836 |
| 437 | Human CD22 | UniProt accession No. P20273 |
| 438 | Human CD37 | uniprot accession no. P11049 |
| 439 | CD3-HCDR1 | TYAMN |
| 440 | CD3-HCDR2 | RIRSKYNNYATYYADSVKG |
| 441 | CD3-HCDR3 | HGNFGNSYVSWFAY |
| 442 | CD3-LCDR1 | GSSTGAVTTSNYAN |
| 443 | CD3-LCDR2 | GTNKRAP |
| 444 | CD3-LCDR3 | ALWYSNLWV |
| 445 | CD3 VH | EVQLLESGGGLVQPGGSLRLSCAASGFTFSTYAMNWVRQAPGKGL |
| | | EWVSRIRSKYNNYATYYADSVKGRFTISRDDSKNTLYLQMNSLRA |
| | | EDTAVYYCVRHGNFGNSYVSWFAYWGQGTLVTVSS |
| 446 | CD3 VL | QAVVTQEPSLTVSPGGTVTLTCGSSTGAVTTSNYANWVQEKPGQA |
| | | FRGLIGGTNKRAPGTPARFSGSLLGGKAALTLSGAQPEDEAEYYC |
| | | ALWYSNLWVFGGGTKLTVL |
| 447 | CD20-HCDR1 | YSWIN |
| 448 | CD20-HCDR2 | RIFPGDGDTDYNGKFK |
| 449 | CD20-HCDR3 | NVFDGYWLVY |
| 450 | CD20-LCDR1 | RSSKSLLHSNGITYLY |
| 451 | CD20-LCDR2 | QMSNLVS |
| 452 | CD20-LCDR3 | AQNLELPYT |
| 453 | CD20 VH | QVQLVQSGAEVKKPGSSVKVSCKASGYAFSYSWINWVRQAPGQGL |
| | | EWMGRIFPGDGDTDYNGKFKGRVTITADKSTSTAYMELSSLRSED |
| | | TAVYYCARNVFDGYWLVYWGQGTLVTVSS |
| 454 | CD20 VL | DIVMTQTPLSLPVTPGEPASISCRSSKSLLHSNGITYLYWYLQKP |
| | | GQSPQLLIYQMSNLVSGVPDRFSGSGSGTDFTLKISRVEAEDVGV |
| | | YYCAQNLELPYTFGGGTKVEIK |
| 455 | CD20 VH-CH1(EE)- | QVQLVQSGAEVKKPGSSVKVSCKASGYAFSYSWINWVRQAPGQGL |
| | CD3 VL-CH1-Fc (knob | EWMGRIFPGDGDTDYNGKFKGRVTITADKSTSTAYMELSSLRSED |
| | P329G LALA) | TAVYYCARNVFDGYWLVYWGQGTLVTVSSASTKGPSVFPLAPSSK |
| | | STSGGTAALGCLVEDYFPEPVTVSWNSGALTSGVHTFPAVLQSSG |
| | | LYSLSSVVTVPSSSLGTQTYICNVNHKPSNTKVDEKVEPKSCDGG |
| | | GGSGGGGSQAVVTQEPSLTVSPGGTVTLTCGSSTGAVTTSNYANW |
| | | VQEKPGQAFRGLIGGTNKRAPGTPARFSGSLLGGKAALTLSGAQP |
| | | EDEAEYYCALWYSNLWVFGGGTKLTVLSSASTKGPSVFPLAPSSK |
| | | STSGGTAALGCLVKDYFPEPVTVSWNSGALTSGVHTFPAVLQSSG |
| | | LYSLSSVVTVPSSSLGTQTYICNVNHKPSNTKVDKKVEPKSCDKT |
| | | HTCPPCPAPEAAGGPSVFLFPPKPKDTLMISRTPEVTCVVVDVSH |
| | | EDPEVKFNWYVDGVEVHNAKTKPREEQYNSTYRVVSVLTVLHQDW |
| | | LNGKEYKCKVSNKALGAPIEKTISKAKGQPREPQVYTLPPCRDEL |
| | | TKNQVSLWCLVKGFYPSDIAVEWESNGQPENNYKTTPPVLDSDGS |
| | | FFLYSKLTVDKSRWQQGNVFSCSVMHEALHNHYTQKSLSLSP |
| 456 | CD20 VH-CH1(EE)-Fc | QVQLVQSGAEVKKPGSSVKVSCKASGYAFSYSWINWVRQAPGQGL |
| | (hole, P329G LALA) | EWMGRIFPGDGDTDYNGKFKGRVTITADKSTSTAYMELSSLRSED |
| | | TAVYYCARNVFDGYWLVYWGQGTLVTVSSASTKGPSVFPLAPSSK |
| | | STSGGTAALGCLVEDYFPEPVTVSWNSGALTSGVHTFPAVLQSSG |
| | | LYSLSSVVTVPSSSLGTQTYICNVNHKPSNTKVDEKVEPKSCDKT |
| | | HTCPPCPAPEAAGGPSVFLFPPKPKDTLMISRTPEVTCVVVDVSH |
| | | EDPEVKFNWYVDGVEVHNAKTKPREEQYNSTYRVVSVLTVLHQDW |
| | | LNGKEYKCKVSNKALGAPIEKTISKAKGQPREPQVCTLPPSRDEL |
| | | TKNQVSLSCAVKGFYPSDIAVEWESNGQPENNYKTTPPVLDSDGS |
| | | FFLVSKLTVDKSRWQQGNVFSCSVMHEALHNHYTQKSLSLSP |
| 457 | CD20 VL-CL(RK) | DIVMTQTPLSLPVTPGEPASISCRSSKSLLHSNGITYLYWYLQKP |
| | | GQSPQLLIYQMSNLVSGVPDRFSGSGSGTDFTLKISRVEAEDVGV |
| | | YYCAQNLELPYTFGGGTKVEIKRTVAAPSVFIFPPSDRKLKSGTA |
| | | SVVCLLNNFYPREAKVQWKVDNALQSGNSQESVTEQDSKDSTYSL |
| | | SSTLTLSKADYEKHKVYACEVTHQGLSSPVTKSFNRGEC |
| 458 | CD3 VH-CL | EVQLLESGGGLVQPGGSLRLSCAASGFTFSTYAMNWVRQAPGKGL |
| | | EWVSRIRSKYNNYATYYADSVKGRFTISRDDSKNTLYLQMNSLRA |
| | | EDTAVYYCVRHGNFGNSYVSWFAYWGQGTLVTVSSASVAAPSVFI |
| | | FPPSDEQLKSGTASVVCLLNNFYPREAKVQWKVDNALQSGNSQES |
| | | VTEQDSKDSTYSLSSTLTLSKADYEKHKVYACEVTHQGLSSPVTK |
| | | SFNRGEC |
| 459 | Human PD-L1 | Uniprot accession no. Q9NZQ7 |
| 460 | VH (PD-L1) | EVQLVESGGGLVQPGGSLRLSCAASGFTFSDSWIHWVRQAPGKGL |
| | | EWVAWISPYGGSTYYADSVKGRFTISADTSKNTAYLQMNSLRAED |
| | | TAVYYCARRHWPGGFDYWGQGTLVTVSS |
| 461 | VL (PD-L1) | DIQMTQSPSSLSASVGDRVTITCRASQDVSTAVAWYQQKPGKAPK |
| | | LLIYSASFLYSGVPSRFSGSGSGTDFTLTISSLQPEDFATYYCQQ |
| | | YLYHPATFGQGTKVEIK |
| 462 | VH (PD-L1) | EVQLVESGGGLVQPGGSLRLSCAASGFTFSRYWMSWVRQAPGKGL |
| | | EWVANIKQDGSEKYYVDSVKGRFTISRDNAKNSLYLQMNSLRAED |
| | | TAVYYCAREGGWFGELAFDYWGQGTLVTVSS |
| 463 | VL (PD-L1) | EIVLTQSPGTLSLSPGERATLSCRASQRVSSSYLAWYQQKPGQAP |
| | | RLLIYDASSRATGIPDRFSGSGSGTDFTLTISRLEPEDFAVYYCQ |
| | | QYGSLPWTFGQGTKVEIK |
| 464 | human PD-1 | Uniprot Q15116 |
| 465 | VH (PD-1) | QVQLVQSGVEVKKPGASVKVSCKASGYTFTNYYMYWVRQAPGQGL |
| | | EWMGGINPSNGGTNFNEKFKNRVTLTTDSSTTTAYMELKSLQFDD |
| | | TAVYYCARRDYRFDMGFDYWGQGTTVTVSS |
| 466 | VL (PD-1) | EIVLTQSPATLSLSPGERATLSCRASKGVSTSGYSYLHWYQQKPG |
| | | QAPRLLIYLASYLESGVPARFSGSGSGTDFTLTISSLEPEDFAVY |
| | | YCQHSRDLPLTFGGGTKVEIK |
| 467 | VH (PD-1) | QVQLVESGGGVVQPGRSLRLDCKASGITFSNSGMHWVRQAPGKGL |
| | | EWVAVIWYDGSKRYYADSVKGRFTISRDNSKNTLFLQMNSLRAED |
| | | TAVYYCATNDDYWGQGTLVTVSS |
| 468 | VL (PD-1) | EIVLTQSPATLSLSPGERATLSCRASQSVSSYLAWYQQKPGQAPR |
| | | LLIYDASNRATGIPARFSGSGSGTDFTLTISSLEPEDFAVYYCQQ |
| | | SSNWPRTFGQGTKVEIK |
| 469 | human EpCAM | UniProt no. P16422 |
| 470 | murine EpCAM | UniProt no. Q99JW5 |
| 471 | human HER3 | UniProt no. P21860 |
| 472 | human CD30 | UniProt no. P28908 |
| 473 | human TBPG | UniProt no. Q13641 |
| 474 | human CD38 | UniProt no. P28907 |
| 475 | human BCMA | UniProt no. Q02223 |
| 476 | human GPRC5D | UniProt no. Q9NZDI |
| 477 | IgGCH1 domain | ASTKGPSVFPLAPSSKSTSGGTAALGCLVKDYFPEPVTVSWNSGA |
| | | LTSGVHTFPAVLQSSGLYSLSSVVTVPSSSLGTQTYICNVNHKPS |
| | | NTKVDKKV |
| 478 | IgGCH2 domain | APELLGGPSVFLFPPKPKDTLMISRTPEVTCVWDVSHEDPEVKFN |
| | | WYVDGVEVHNAKTKPREEQESTYRWSVLTVLHQDWLNGKEYKCKV |
| | | SNKALPAPIEKTISKAK |
| 479 | IgGCH3 domain | GQPREPQVYTLPPSRDELTKNQVSLTCLVKGFYPSDIAVEWESNG |
| | | QPENNYKTTPPVLDSDGSFFLYSKLTVDKSRWQQGNVFSCSVMHE |
| | | ALHNHYTQKSLSLSPG |
| 480 | CH1 connector | EPKSC |
| 481 | Hinge full | DKTHTCPXCP with X being S or P |
| 482 | Hinge middle | HTCPXCP with X being S or P |
| 483 | Hinge short | CPXCP with X being S or P |
| 484 | IgG1, caucasian | ASTKGPSVFPLAPSSKSTSGGTAALGCLVKDYFPEPVTVSWNSGA |
| | allotype | LTSGVHTFPAVLQSSGLYSLSSVVTVPSSSLGTQTYICNVNHKPS |
| | | NTKVDKKVEPKSCDKTHTCPPCPAPELLGGPSVFLFPPKPKDTLM |
| | | ISRTPEVTCVVVDVSHEDPEVKFNWYVDGVEVHNAKTKPREEQYN |
| | | STYRVVSVLTVLHQDWLNGKEYKCKVSNKALPAPIEKTISKAKGQ |
| | | PREPQVYTLPPSRDELTKNQVSLTCLVKGFYPSDIAVEWESNGQP |
| | | ENNYKTTPPVLDSDGSFFLYSKLTVDKSRWQQGNVFSCSVMHEAL |
| | | HNHYTQKSLSLSPGK |
| 485 | IgG1, afroamerican | ASTKGPSVFPLAPSSKSTSGGTAALGCLVKDYFPEPVTVSWNSGA |
| | allotype | LTSGVHTFPAVLQSSGLYSLSSVVTVPSSSLGTQTYICNVNHKPS |
| | | NTKVDKKVEPKSCDKTHTCPPCPAPELLGGPSVFLFPPKPKDTLM |
| | | ISRTPEVTCVVVDVSHEDPEVKFNWYVDGVEVHNAKTKPREEQYN |
| | | STYRVVSVLTVLHQDWLNGKEYKCKVSNKALPAPIEKTISKAKGQ |
| | | PREPQVYTLPPSREEMTKNQVSLTCLVKGFYPSDIAVEWESNGQP |
| | | ENNYKTTPPVLDSDGSFFLYSKLTVDKSRWQQGNVFSCSVMHEAL |
| | | HNHYTQKSLSLSPGK |
| 486 | IgG2 | ASTKGPSVFPLAPCSRSTSESTAALGCLVKDYFPEPVTVSWNSGA |
| | | LTSGVHTFPAVLQSSGLYSLSSVVTVPSSNFGTQTYTCNVDHKPS |
| | | NTKVDKTVERKCCVECPPCPAPPVAGPSVFLFPPKPKDTLMISRT |
| | | PEVTCVVVDVSHEDPEVQFNWYVDGVEVHNAKTKPREEQFNSTFR |
| | | VVSVLTVVHQDWLNGKEYKCKVSNKGLPAPIEKTISKTKGQPREP |
| | | QVYTLPPSREEMTKNQVSLTCLVKGFYPSDISVEWESNGQPENNY |
| | | KTTPPMLDSDGSFFLYSKLTVDKSRWQQGNVFSCSVMHEALHNHY |
| | | TQKSLSLSPGK |
| 487 | IgG3 | ASTKGPSVFPLAPCSRSTSGGTAALGCLVKDYFPEPVTVSWNSGA |
| | | LTSGVHTFPAVLQSSGLYSLSSVVTVPSSSLGTQTYTCNVNHKPS |
| | | NTKVDKRVELKTPLGDTTHTCPRCPEPKSCDTPPPCPRCPEPKSC |
| | | DTPPPCPRCPEPKSCDTPPPCPRCPAPELLGGPSVFLFPPKPKDT |
| | | LMISRTPEVTCVVVDVSHEDPEVQFKWYVDGVEVHNAKTKPREEQ |
| | | YNSTFRVVSVLTVLHQDWLNGKEYKCKVSNKALPAPIEKTISKTK |
| | | GQPREPQVYTLPPSREEMTKNQVSLTCLVKGFYPSDIAVEWESSG |
| | | QPENNYNTTPPMLDSDGSFFLYSKLTVDKSRWQQGNIFSCSVMHE |
| | | ALHNRFTQKSLSLSPGK |
| 488 | IgG4 | ASTKGPSVFPLAPCSRSTSESTAALGCLVKDYFPEPVTVSWNSGA |
| | | LTSGVHTFPAVLQSSGLYSLSSVVTVPSSSLGTKTYTCNVDHKPS |
| | | NTKVDKRVESKYGPPCPSCPAPEFLGGPSVFLFPPKPKDTLMISR |
| | | TPEVTCVVVDVSQEDPEVQFNWYVDGVEVHNAKTKPREEQFNSTY |
| | | RVVSVLTVLHQDWLNGKEYKCKVSNKGLPSSIEKTISKAKGQPRE |
| | | PQVYTLPPSQEEMTKNQVSLTCLVKGFYPSDIAVEWESNGQPENN |
| | | YKTTPPVLDSDGSFFLYSRLTVDKSRWQEGNVFSCSVMHEALHNH |
| | | YTQKSLSLSLGK |
| 489 | CD28(variant 8) CDR- | SYYIH |
| | H1 | |
| 490 | CD28(variant 8) CDR- | SIYPGNVQTNYNEKFKD |
| | H2 | |
| 491 | CD28(variant 8) CDR- | SHYGLDWNFDV |
| | H3 | |
| 492 | CD28(variant 8) CDR- | HASQNIYVYLN |
| | L1 | |
| 493 | CD28(variant 8) CDR- | KASNLHT |
| | L2 | |
| 494 | CD28(variant 8) CDR- | QQGQTYPYT |
| | L3 | |
| 495 | CD28(variant 15) CDR- | SYYIH |
| | H1 | |
| 496 | CD28(variant 15) CDR- | SIYPGNVQTNYNEKFKD |
| | H2 | |
| 497 | CD28(variant 15) CDR- | SHYGLDWNFDV |
| | H3 | |
| 498 | CD28(variant 15) CDR- | HASQNIYVFLN |
| | L1 | |
| 499 | CD28(variant 15) CDR- | KASNLHT |
| | L2 | |
| 500 | CD28(variant 15) CDR- | QQGQTYPYT |
| | L3 | |
| 501 | CD28(variant 29) CDR- | SYYIH |
| | H1 | |
| 502 | CD28(variant 29) CDR- | SIYPGNVNTNYNEKFKD |
| | H2 | |
| 503 | CD28(variant 29) CDR- | SHYGLDWNFDV |
| | H3 | |
| 504 | CD28(variant 29) CDR- | HASQNIYVWLN |
| | L1 | |
| 505 | CD28(variant 29) CDR- | KASNLHT |
| | L2 | |
| 506 | CD28(variant 29) CDR- | QQGQTYPYT |
| | L3 | |
| 507 | CEA (T84.66-LCHA)- | DTYMH |
| | CDR-H1 | |
| 508 | CEA (T84.66-LCHA)- | RIDPANGNSKYVPKFQG |
| | CDR-H2 | |
| 509 | CEA (T84.66-LCHA)- | FGYYVSDYAMAY |
| | CDR-H3 | |
| 510 | CEA (T84.66-LCHA)- | RAGESVDIFGVGFLH |
| | CDR-L1 | |
| 511 | CEA (T84.66-LCHA)- | RASNRAT |
| | CDR-L2 | |
| 512 | CEA (T84.66-LCHA)- | QQTNEDPYT |
| | CDR-L3 | |
| 513 | CEA (T84.66-LCHA) | QVQLVQSGAEVKKPGSSVKVSCKASGFNIKDTYMHWVRQAPGQGL |
| | VH | EWMGRIDPANGNSKYVPKFQGRVTITADTSTSTAYMELSSLRSED |
| | | TAVYYCAPFGYYVSDYAMAYWGQGTLVTVSS |
| 514 | CEA (T84.66-LCHA) | EIVLTQSPATLSLSPGERATLSCRAGESVDIFGVGFLHWYQQKPG |
| | VL | QAPRLLIYRASNRATGIPARFSGSGSGTDFTLTISSLEPEDFAVY |
| | | YCQQTNEDPYTFGQGTKLEIK |
| 515 | EpCAM (MT201)- | SYGMH |
| | CDR-H1 | |
| 516 | EpCAM (MT201)- | VISYDGSNKYYADSVKG |
| | CDR-H2 | |
| 517 | EpCAM (MT201)- | DMGWGSGWRPYYYYGM |
| | CDR-H3 | |
| 518 | EpCAM (MT201)- | RTSQSISSYLN |
| | CDR-L1 | |
| 519 | EpCAM (MT201)- | WASTRES |
| | CDR-L2 | |
| 520 | EpCAM (MT201)- | QQSYDIPYT |
| | CDR-L3 | |
| 521 | EpCAM (MT201) VH | EVQLLESGGGVVQPGRSLRLSCAASGFTFSSYGMHWVRQAPGK |
| | | GLEWVAVISYDGSNKYYADSVKGRFTISRDNSKNTLYLQMNSL |
| | | RAEDTAVYYCAKDMGWGSGWRPYYYYGMDVWGQGTTVTVSS |
| 522 | EpCAM (MT201) VL | ELQMTQSPSSLSASVGDRVTITCRTSQSISSYLNWYQQKPGQPPK |
| | | LLIYWASTRESGVPDRFSGSGSGTDFTLTISSLQPEDSATYYCQQ |
| | | SYDIPYTFGQGTKLEIK |
| 523 | HER3-CDR-H1 | SSYIS |
| 524 | HER3-CDR-H2 | WIYAGTGSPSYNQKLQG |
| 525 | HER3-CDR-H3 | HRDYYSNSL |
| 526 | HER3-CDR-L1 | KSSQSVLNSGNQKNYLT |
| 527 | HER3-CDR-L2 | WASTRES |
| 528 | HER3-CDR-L3 | QSDYSYPYT |
| 529 | HER3 VH | QVQLVQSGAEVKKPGASVKVSCKASGYTFRSSYISWVRQAPGQGL |
| | | EWMGWIYAGTGSPSYNQKLQGRVTMTTDTSTSTAYMELRSLRSDD |
| | | TAVYYCARHRDYYSNSLTYWGQGTLVTVSS |
| 530 | HER3 VL | DIVMTQSPDSLAVSLGERATINCKSSQSVLNSGNQKNYLTWYQQK |
| | | PGQPPKLLIYWASTRESGVPDRFSGSGSGTDFTLTISSLQAEDVA |
| | | VYYCQSDYSYPYTFGQGTKLEIK |
| 531 | CD30- CDR-H1 | DYYIT |
| 532 | CD30- CDR-H2 | WIYPGSGNTKYNEKFKG |
| 533 | CD30- CDR-H3 | YGNYWF |
| 534 | CD30- CDR-L1 | KASQSVDFDGDSYMN |
| 535 | CD30- CDR-L2 | AASNLES |
| 536 | CD30- CDR-L3 | QQSNEDPWT |
| 537 | CD30 VH | QIQLQQSGPEVVKPGASVKISCKASGYTFTDYYITWVKQKPGQGL |
| | | EWIGWIYPGSGNTKYNEKFKGKATLTVDTSSSTAFMQLSSLTSED |
| | | TAVYFCANYGNYWFAYWGQGTQVTVSA |
| 538 | CD30 VL | DIVLTQSPASLAVSLGQRATISCKASQSVDFDGDSYMNWYQQKPG |
| | | QPPKVLIYAASNLESGIPARFSGSGSGTDFTLNIHPVEEEDAATY |
| | | YCQQSNEDPWTFGGGTKLEIK |
| 539 | TPBG(FAB091)- CDR- | SDAMH |
| | H1 | |
| 540 | TPBG(FAB091)- CDR- | GVSGSGGSPYYADSVKG |
| | H2 | |
| 541 | TPBG(FAB091)- CDR- | GGSIAGSYYYYPMDV |
| | H3 | |
| 542 | TPBG(FAB091)- CDR- | QASQDISNYLN |
| | L1 | |
| 543 | TPBG(FAB091)- CDR- | AASTLQI |
| | L2 | |
| 544 | TPBG(FAB091)- CDR- | QQANSFPLT |
| | L3 | |
| 545 | TPBG(FAB091) VH | EVHLLESGGGLVHPGGSLRLSCAASGFTFRSDAMHWVRQAPGKGL |
| | | EWVSGVSGSGGSPYYADSVKGRFTISRDDSKTTLYLQMNSLRAED |
| | | TAVYYCATGGSTAGSYYYYPMDVWGQGTTVTVSS |
| 546 | TPBG(FAB091) VL | DIQMTQSPSSLSASVGDRVTITCQASQDISNYLNWYQQKPGKAPK |
| | | LLIYAASTLQIGVPSRFSGSGSGTDFTFTISSLQPEDFATYYCQQ |
| | | ANSFPLTFGGGTKVEIK |
| 547 | CD38-CDR-H1 | SFAMS |
| 548 | CD38-CDR-H2 | AISGSGGGTYYADSVKG |
| 549 | CD38-CDR-H3 | DKILWFGEPVFDY |
| 550 | CD38-CDR-L1 | RASQSVSSYLA |
| 551 | CD38-CDR-L2 | DASNRAT |
| 552 | CD38-CDR-L3 | QQRSNWPPT |
| 553 | CD38 VH | EVQLLESGGGLVQPGGSLRLSCAVSGFTFNSFAMSWVRQAPGKGL |
| | | EWVSAISGSGGGTYYADSVKGRFTISRDNSKNTLYLQMNSLRAED |
| | | TAVYFCAKDKILWFGEPVFDYWGQGTLVTVSS |
| 554 | CD38 VL | EIVLTQSPATLSLSPGERATLSCRASQSVSSYLAWYQQKPGQAPR |
| | | LLIYDASNRATGIPARFSGSGSGTDFTLTISSLEPEDFAVYYCQQ |
| | | RSNWPPTFGQGTKVEIK |
| 555 | BCMA - CDR-H1 | SYAMN |
| 556 | BCMA - CDR-H2 | AITASGGSTYYADSVKG |
| 557 | BCMA - CDR-H3 | YWPMSL |
| 558 | BCMA - CDR-L1 | RASQSVSAYYLA |
| 559 | BCMA - CDR-L2 | DASIRAT |
| 560 | BCMA - CDR-L3 | QQYERWPLT |
| 561 | BCMA VH | EVQLLESGGGLVQPGGSLRLSCAASGFTFSSYAMNWVRQAPGKGL |
| | | EWVSAITASGGSTYYADSVKGRFTISRDNSKNTLYLQMNSLRAED |
| | | TAVYYCARYWPMSLWGQGTLVTVSS |
| 562 | BCMA VL | EIVLTQSPGTLSLSPGERATLSCRASQSVSAYYLAWYQQKPGQAP |
| | | RLLMYDASIRATGIPDRFSGSGSGTDFTLTISRLEPEDFAVYYCQ |
| | | QYERWPLTFGQGTKVEIK |
| 563 | GPRC5D (5E11) - | KYAMA |
| | CDR-H1 | |
| 564 | GPRC5D (5E11) - | SISTGGVNTYYADSVKG |
| | CDR-H2 | |
| 565 | GPRC5D (5E11) - | HTGDYFDY |
| | CDR-H3 | |
| 566 | GPRC5D (5E11) - | RASQSVSISGINLMN |
| | CDR-L1 | |
| 567 | GPRC5D (5E11) - | HASILAS |
| | CDR-L2 | |
| 568 | GPRC5D (5E11) - | QQTRESPLT |
| | CDR-L3 | |
| 569 | GPRC5D (5E11) VH1c | EVQLLESGGGLVQPGGSLRLSCAASGFTFSKYAMAWVRQAPGKGL |
| | | EWVASISTGGVNTYYADSVKGRFTISRDNSKNTLYLQMNSLRAED |
| | | TAVYYCATHTGDYFDYWGQGTMVTVSS |
| 570 | GPRC5D (5E11) VL2b | EIVLTQSPGTLSLSPGERATLSCRASQSVSISGINLMNWYQQKPG |
| | | QQPKLLIYHASILASGIPDRFSGSGSGTDFTLTISRLEPEDFAVY |
| | | YCQQTRESPLTFGQGTRLEIK |
| 571 | GPRC5D (5E11) VH1a | EVQLLESGGGLVQPGGSLRLSCAASGFTFSKYAMAWVRQAPGKGL |
| | | EWVASISTGGVNTYYRDSVKARFTISRDNSKNTLYLQMNSLRAED |
| | | TAVYYCATHTGDYFDYWGQGTMVTVSS |
| 572 | GPRC5D (5E11) VH1b | ELQLLESGGGLVQPGGSLRLSCAASGFTFSKYAMAWVRQAPGKGL |
| | | EWVASISTGGVNTYYRDSVKARFTISRDNAKNTLYLQMNSLRAED |
| | | TAVYYCATHTGDYFDYWGQGTMVTVSS |
| 573 | GPRC5D (5E11) VH1d | ELQLLESGGGLVQPGGSLRLSCAASGFTFSKYAMAWVRQAPGKGL |
| | | EWVASISTGGVNTYYADSVKGRFTISRDNAKNTLYLQMNSLRAED |
| | | TAVYYCATHTGDYFDYWGQGTMVTVSS |
| 574 | GPRC5D (5E11) VL1a | DIVMTQSPDSLAVSLGERATINCRASQSVSISGINLMNWYQQKPG |
| | | QQPKLLIYHASILASGVPDRFSGSGSGTDFTLTISSLQAEDVAVY |
| | | YCQQTRESPLTFGQGTRLEIK |
| 575 | GPRC5D (5E11) VL1c | DIVMTQSPDSLAVSLGERATINCKSSQSVSISGINLMNWYQQKPG |
| | | QQPKLLIYHASILASGVPDRFSGSGSGTDFTLTISSLQAEDVAVY |
| | | YCQQTRESPLTFGQGTRLEIK |
| 576 | GPRC5D (5E11) VL2a | EIVLTQSPGTLSLSPGERATLSCRASQSVSISGINLMNWYQQKPG |
| | | QQPRLLIYHASILASGIPDRFSGSGSGTDFTLTISRLEPEDFAVY |
| | | YCQQTRESPLTFGQGTRLEIK |
| 577 | GPRC5D (5E11) VL3a | DIQMTQSPSSLSASVGDRVTITCRASQSVSISGINLMNWYQQKPG |
| | | KQPKLLIYHASILASGVPSRFSGSGSGTDFTLTISSLQPEDFATY |
| | | YCQQTRESPLTFGQGTRLEIK |
| 578 | GPRC5D (5E11) VL3b | DIQMTQSPSSLSASVGDRVTITCRASQSVSISGINLMNWYQQKPG |
| | | QQPKLLIYHASILASGVPSRFSGSGSGTDFTLTISSLQPEDFATY |
| | | YCQQTRESPLTFGQGTRLEIK |
| 579 | GPRC5D (5F11) - | NYGMA |
| | CDR-H1 | |
| 580 | GPRC5D (5F11) - | SISTGGGNTYYRDSVKG |
| | CDR-H2 | |
| 581 | GPRC5D (5F11) - | HDRGGLY |
| | CDR-H3 | |
| 582 | GPRC5D (5F11) - | RSSKSLLHSNGITYVY |
| | CDR-L1 | |
| 583 | GPRC5D (5F11) - | RMSNRAS |
| | CDR-L2 | |
| 584 | GPRC5D (5F11) - | GQLLENPYT |
| | CDR-L3 | |
| 585 | GPRC5D (5F11) VH1a | QVQLVESGGGVVQPGRSLRLSCAASGFSFSNYGMAWVRQAPGKGL |
| | | EWVASISTGGGNTYYRDSVKGRFTISRDNSKNTLYLQMNSLRAED |
| | | TAVYYCTRHDRGGLYWGQGTMVTVSS |
| 586 | GPRC5D (5F11) VH1b | EVQLVESGGGVVQPGRSLRLSCAASGFSFSNYGMAWVRQAPGKGL |
| | | EWVASISTGGGNTYYRDSVKGRFTISRDNAKNTLYLQMNSLRAED |
| | | TAVYYCTRHDRGGLYWGQGTMVTVSS |
| 587 | GPRC5D (5F11) VH1c | QVQLVESGGGVVQPGRSLRLSCAASGFSFSNYGMAWVRQAPGKGL |
| | | EWVASISTGGGNTYYADSVKGRFTISRDNSKNTLYLQMNSLRAED |
| | | TAVYYCTRHDRGGLYWGQGTMVTVSS |
| 588 | GPRC5D (5F11) VH1d | EVQLVESGGGVVQPGRSLRLSCAASGFSFSNYGMAWVRQAPGKGL |
| | | EWVASISTGGGNTYYADSVKGRFTISRDNAKNTLYLQMNSLRAED |
| | | TAVYYCTRHDRGGLYWGQGTMVTVSS |
| 589 | GPRC5D (5F11) VH2b | EVQLVESGGGLVQPGGSLRLSCAASGFSFSNYGMAWVRQAPGKGL |
| | | EWVASISTGGGNTYYRDSVKGRFTISRDNAKNTLYLQMNSLRAED |
| | | TAVYYCTRHDRGGLYWGQGTMVTVSS |
| 590 | GPRC5D (5F11) VH2d | EVQLVESGGGLVQPGGSLRLSCAASGFSFSNYGMAWVRQAPGKGL |
| | | EWVASISTGGGNTYYADSVKGRFTISRDNAKNTLYLQMNSLRAED |
| | | TAVYYCTRHDRGGLYWGQGTMVTVSS |
| 591 | GPRC5D (5F11) VL1a | DIVMTQSPLSLPVTPGEPASISCRSSKSLLHSNGITYVYWYLQKP |
| | | GQSPQVLIYRMSNLASGVPDRFSGSGSGTDFTLKISRVEAEDVGV |
| | | YHCGQLLENPYTFGQGTKLEIK |
| 592 | GPRC5D (5F11) VL1b | DIVMTQSPLSLPVTPGEPASISCRSSKSLLHSNGITYVYWYLQKP |
| | | GKSPQVLIYRMSNLASGVPDRFSGSGSGTDFTLKISRVEAEDVGV |
| | | YHCGQLLENPYTFGQGTKLEIK |
| 593 | GPRC5D (5F11) VL2a | DIVMTQSPLSLPVTPGEPASISCRSSKSLLHSNGITYVYWYLQKP |
| | | GQSPQLLIYRMSNRASGVPDRFSGSGSGTDFTLKISRVEAEDVGV |
| | | YHCGQLLENPYTFGQGTKLEIK |
| 594 | GPRC5D (5F11) VL2b | DIVMTQSPDSLAVSLGERATINCKSSKSLLHSNGITYVYWYQQKP |
| | | GQPPKLLIYRMSNLASGVPDRFSGSGSGTDFTLTISSLQAEDVAV |
| | | YHCGQLLENPYTFGQGTKLEIK |
| 595 | GPRC5D (5F11) VL2c | EIVLTQSPGTLSLSPGERATLSCRASKSLLHSNGITYVYWYQQKP |
| | | GQAPRLLIYRMSNLASGIPDRFSGSGSGTDFTLTISRLEPEDFAV |
| | | YHCGQLLENPYTFGQGTKLEIK |
| 596 | CD3 (C122) CDR-H1 | SYAMN |
| 597 | CD3 (C122) CDR-H2 | RIRSKYNNYATYYADSVKG |
| 598 | CD3 (C122) CDR-H3 | HTTFPSSYVSYYGY |
| 599 | CD3 (C122) CDR-L1 | GSSTGAVTTSNYAN |
| 600 | CD3 (C122) CDR-L2 | GTNKRAP |
| 601 | CD3 (C122) CDR-L3 | ALWYSNLWV |
| 602 | CD3 (C122) VH | EVQLLESGGGLVQPGGSLRLSCAASGFQFSSYAMNWVRQAPGKGL |
| | | EWVSRIRSKYNNYATYYADSVKGRFTISRDDSKNTLYLQMNSLRA |
| | | EDTAVYYCVRHTTFPSSYVSYYGYWGQGTLVTVSS |
| 603 | CD3 (C122) VL | QAVVTQEPSLTVSPGGTVTLTCGSSTGAVTTSNYANWVQEKPGQA |
| | | FRGLIGGTNKRAPGTPARFSGSLLGGKAALTLSGAQPEDEAEYYC |
| | | ALWYSNLWVFGGGTKLTVL |
| 604 | CD3 (V9) CDR-H1 | GYSFTGYTMN |
| 605 | CD3 (V9) CDR-H2 | LINPYKGVSTYNQKFKD |
| 606 | CD3 (V9) CDR-H3 | SGYYGDSDWYFDV |
| 607 | CD3 (V9) CDR-L1 | RASQDIRNYLN |
| 608 | CD3 (V9) CDR-L2 | YTSRLES |
| 609 | CD3 (V9) CDR-L3 | QQGNTLPWT |
| 610 | CD3 (V9) VH | EVQLVESGGGLVQPGGSLRLSCAASGYSFTGYTMNWVRQAPGKGL |
| | | EWVALINPYKGVSTYNQKFKDRFTISVDKSKNTAYLQMNSLRAED |
| | | TAVYYCARSGYYGDSDWYFDVWGQGTLVTVSS |
| 611 | CD3 (V9) VL | DIQMTQSPSSLSASVGDRVTITCRASQDIRNYLNWYQQKPGKAPK |
| | | LLIYYTSRLESGVPSRFSGSGSGTDYTLTISSLQPEDFATYYCQQ |
| | | GNTLPWTFGQGTKVEIK |

[0752] General information regarding the nucleotide sequences of human immunoglobulins light and heavy chains is given in: Kabat, E. A., et al., Sequences of Proteins of Immunological Interest, 5th ed., Public Health Service, National Institutes of Health, Bethesda, Md. (1991). Amino acids of antibody chains are numbered and referred to according to the numbering systems according to Kabat (Kabat, E. A., et al., Sequences of Proteins of Immunological Interest, 5th ed., Public Health Service, National Institutes of Health, Bethesda, Md. (1991)) as defined above.

The following numbered paragraphs (paras) describe aspects of the present invention:

[0753] 1. A bispecific agonistic CD28 antigen binding molecule characterized by monovalent binding to CD28, comprising

(a) one antigen binding domain capable of specific binding to CD28,
(b) at least one antigen binding domain capable of specific binding to a tumor-associated antigen, and
(c) a Fc domain composed of a first and a second subunit capable of stable association comprising one or more amino acid substitution that reduces the binding affinity of the antigen binding molecule to an Fc receptor and/or effector function.

[0754] 2. The bispecific agonistic CD28 antigen binding molecule of para 1, wherein the Fc domain is an IgG, particularly an IgG1 Fc domain or an IgG4 Fc domain.

[0755] 3. The bispecific agonistic CD28 antigen binding molecule of paras 1 or 2, wherein the Fc domain is of human IgG1 subclass and comprises the amino acid mutations L234A, L235A and P329G (numbering according to Kabat EU index).

[0756] 4. The bispecific agonistic CD28 antigen binding molecule of any one of paras 1 to 3, wherein the antigen binding domain capable of specific binding to CD28 comprises

(i) a heavy chain variable region (V_{H}CD28) comprising a heavy chain complementary determining region CDR-H1 of SEQ ID NO: 20, a CDR-H2 of SEQ ID NO: 21, and a CDR-H3 of SEQ ID NO: 22, and a light chain variable region (V_{L}CD28) comprising a light chain complementary determining region CDR-L1 of SEQ ID NO: 23, a CDR-L2 of SEQ ID NO: 24 and a CDR-L3 of SEQ ID NO: 25; or
(ii) a heavy chain variable region (V_{H}CD28) comprising a CDR-H1 of SEQ ID NO: 36, a CDR-H2 of SEQ ID NO: 37, and a CDR-H3 of SEQ ID NO: 38, and a light chain variable region (V_{L}CD28) comprising a CDR-L1 of SEQ ID NO: 39, a CDR-L2 of SEQ ID NO: 40 and a CDR-L3 of SEQ ID NO: 41.

[0757] 5. The bispecific agonistic CD28 antigen binding molecule of any one of paras 1 to 4, wherein the antigen binding domain capable of specific binding to CD28 comprises a heavy chain variable region (V_{H}CD28) comprising a CDR-H1 of SEQ ID NO: 20, a CDR-H2 of SEQ ID NO: 21, and a CDR-H3 of SEQ ID NO: 22, and a light chain variable region (V_{L}CD28) comprising a CDR-L1 of SEQ ID NO: 23, a CDR-L2 of SEQ ID NO: 24 and a CDR-L3 of SEQ ID NO: 25.

[0758] 6. The bispecific agonistic CD28 antigen binding molecule of any one of paras 1 to 5, wherein the antigen binding domain capable of specific binding to CD28 comprises a heavy chain variable region (V_{H}CD28) comprising an amino acid sequence that is at least about 95%, 96%, 97%, 98%, 99% or 100% identical to the amino acid sequence of SEQ ID NO:26, and a light chain variable region (V_{L}CD28) comprising an amino acid sequence that is at least about 95%, 96%, 97%, 98%, 99% or 100% identical to the amino acid sequence of SEQ ID NO:27.

[0759] 7. The bispecific agonistic CD28 antigen binding molecule of any one of paras 1 to 4, wherein the antigen binding domain capable of specific binding to CD28 comprises a heavy chain variable region (V_{H}CD28) comprising an amino acid sequence selected from the group consisting of SEQ ID NO:42, SEQ ID NO:43, SEQ ID NO:44, SEQ ID NO:45, SEQ ID NO:46, SEQ ID NO:47, SEQ ID NO:48, SEQ ID NO:49, SEQ ID NO:50 and SEQ ID NO:51, and a light chain variable region (V_{L}CD28) comprising an amino acid sequence selected from the group consisting of SEQ ID NO:27, SEQ ID NO:52, SEQ ID NO:53, SEQ ID NO:54, SEQ ID NO:55, SEQ ID NO:56, SEQ ID NO:57, SEQ ID NO:58, SEQ ID NO:59, SEQ ID NO:60 and SEQ ID NO:60.

[0760] 8. The bispecific agonistic CD28 antigen binding molecule of any one of paras 1 to 4 or 7, wherein the antigen binding domain capable of specific binding to CD28 comprises

[0761] (a) a heavy chain variable region (V_{H}CD28) comprising the amino acid sequence of SEQ ID NO:47 and a light chain variable region (V_{L}CD28) comprising the amino acid sequence of SEQ ID NO:54, or

[0762] (b) a heavy chain variable region (V_{H}CD28) comprising the amino acid sequence of SEQ ID NO:47 and a light chain variable region (V_{L}CD28) comprising the amino acid sequence of SEQ ID NO:27, or

[0763] (c) a heavy chain variable region (V_{H}CD28) comprising the amino acid sequence of SEQ ID NO:51 and a light chain variable region (V_{L}CD28) comprising the amino acid sequence of SEQ ID NO:61, or

[0764] (d) a heavy chain variable region (V_{H}CD28) comprising the amino acid sequence of SEQ ID NO:46 and a light chain variable region (V_{L}CD28) comprising the amino acid sequence of SEQ ID NO:53, or

[0765] (e) a heavy chain variable region (V_{H}CD28) comprising the amino acid sequence of SEQ ID NO:46 and a light chain variable region (V_{L}CD28) comprising the amino acid sequence of SEQ ID NO:54, or

[0766] (f) a heavy chain variable region (V_{H}CD28) comprising the amino acid sequence of SEQ ID NO:46 and a light chain variable region (V_{L}CD28) comprising the amino acid sequence of SEQ ID NO:59, or

[0767] (g) a heavy chain variable region (V_{H}CD28) comprising the amino acid sequence of SEQ ID NO:46 and a light chain variable region (V_{L}CD28) comprising the amino acid sequence of SEQ ID NO:27, or

[0768] (h) a heavy chain variable region (V_{H}CD28) comprising the amino acid sequence of SEQ ID NO:43 and a light chain variable region (V_{L}CD28) comprising the amino acid sequence of SEQ ID NO:27, or

[0769] (i) a heavy chain variable region (V_{H}CD28) comprising the amino acid sequence of SEQ ID NO:42 and a light chain variable region (V_{L}CD28) comprising the amino acid sequence of SEQ ID NO:53, or

[0770] (j) a heavy chain variable region (V_{H}CD28) comprising the amino acid sequence of SEQ ID NO:42 and a light chain variable region (V_{L}CD28) comprising the amino acid sequence of SEQ ID NO:59, or

[0771] (k) a heavy chain variable region (V_{H}CD28) comprising the amino acid sequence of SEQ ID NO:42 and a light chain variable region (V_{L}CD28) comprising the amino acid sequence of SEQ ID NO:27.

[0772] 9. The bispecific agonistic CD28 antigen binding molecule of any one of paras 1 to 8, wherein the antigen binding domain capable of specific binding to a tumor-associated antigen is an antigen binding domain capable of specific binding to Carcinoembryonic Antigen (CEA).

[0773] 10. The bispecific agonistic CD28 antigen binding molecule of any one of paras 1 to 9, wherein the antigen binding domain capable of specific binding to CEA comprises a heavy chain variable region (V_{H}CEA) comprising (i) CDR-H1 comprising the amino acid sequence of SEQ ID NO: 127, (ii) CDR-H2 comprising the amino acid sequence of SEQ ID NO: 128, and (iii) CDR-H3 comprising the amino acid sequence of SEQ ID NO: 129, and a light chain variable region (V_{L}CEA) comprising (iv) CDR-L1 comprising the amino acid sequence of SEQ ID NO: 130, (v) CDR-L2 comprising the amino acid sequence of SEQ ID NO: 131, and (vi) CDR-L3 comprising the amino acid sequence of SEQ ID NO: 132.

[0774] 11. The bispecific agonistic CD28 antigen binding molecule of any one of paras 1 to 10, wherein the antigen binding domain capable of specific binding to CEA comprises a heavy chain variable region (V_{H}CEA) comprising an amino acid sequence that is at least about 95%, 96%, 97%, 98%, 99% or 100% identical to the amino acid sequence of SEQ ID NO: 133, and a light chain variable region (V_{L}CEA) comprising an amino acid sequence that is at least about 95%, 96%, 97%, 98%, 99% or 100% identical to the amino acid sequence of SEQ ID NO: 134.

[0775] 12. The bispecific agonistic CD28 antigen binding molecule of any one of paras 1 to 8, wherein the antigen binding domain capable of specific binding to a tumor-associated antigen is an antigen binding domain capable of specific binding to Fibroblast Activation Protein (FAP).

[0776] 13. The bispecific agonistic CD28 antigen binding molecule of any one of paras 1 to 8 or 12, wherein the antigen binding domain capable of specific binding to FAP comprises

[0777] (a) a heavy chain variable region (V_{H}FAP) comprising (i) CDR-H1 comprising the amino acid sequence of SEQ ID NO: 12, (ii) CDR-H2 comprising the amino acid sequence of SEQ ID NO: 13, and (iii) CDR-H3 comprising the amino acid sequence of SEQ ID NO: 14, and a light chain variable region (V_{L}FAP) comprising (iv) CDR-L1 comprising the amino acid sequence of SEQ ID NO: 15, (v) CDR-L2 comprising the amino acid sequence of SEQ ID NO: 16, and (vi) CDR-L3 comprising the amino acid sequence of SEQ ID NO: 17, or

[0778] (b) a heavy chain variable region (V_{H}FAP) comprising (i) CDR-H1 comprising the amino acid sequence of SEQ ID NO:4, (ii) CDR-H2 comprising the amino acid sequence of SEQ ID NO:5, and (iii) CDR-H3 comprising the amino acid sequence of SEQ ID NO:6, and a light chain variable region (V_{L}FAP) comprising (iv) CDR-L1 comprising the amino acid sequence of SEQ ID NO:7, (v) CDR-L2 comprising the amino acid sequence of SEQ ID NO:8, and (vi) CDR-L3 comprising the amino acid sequence of SEQ ID NO:9.

[0779] 14. The bispecific agonistic CD28 antigen binding molecule of any one of paras 1 to 8 or 12 or 13, wherein the antigen binding domain capable of specific binding to FAP comprises

(a) a heavy chain variable region (V_{H}FAP) comprising an amino acid sequence that is at least about 95%, 96%, 97%, 98%, 99% or 100% identical to the amino acid sequence of SEQ ID NO:18, and a light chain variable region (V_{L}FAP) comprising an amino acid sequence that is at least about 95%, 96%, 97%, 98%, 99% or 100% identical to the amino acid sequence of SEQ ID NO:19, or
(b) a heavy chain variable region (V_{H}FAP) comprising an amino acid sequence that is at least about 95%, 96%, 97%, 98%, 99% or 100% identical to the amino acid sequence of SEQ ID NO: 10, and a light chain variable region (V_{L}FAP) comprising an amino acid sequence that is at least about 95%, 96%, 97%, 98%, 99% or 100% identical to the amino acid sequence of SEQ ID NO:11.

[0780] 15. The bispecific agonistic CD28 antigen binding molecule of any one of paras 1 to 8 or 12 to 14, wherein the antigen binding domain capable of specific binding to FAP comprises a heavy chain variable region (V_{H}FAP) comprising the amino acid sequence of SEQ ID NO: 18 and a light chain variable region (V_{L}FAP) comprising the amino acid sequence of SEQ ID NO:19.

[0781] 16. The bispecific agonistic CD28 antigen binding molecule of any one of paras 1 to 15, wherein the antigen binding domain capable of specific binding to CD28 is a Fab fragment or a crossFab fragment.

[0782] 17. The bispecific agonistic CD28 antigen binding molecule of any one of paras 1 to 16, comprising

[0783] (a) one Fab fragment capable of specific binding to CD28,

[0784] (b) one crossFab fragment capable of specific binding to a tumor-associated antigen, and

[0785] (c) a Fc domain composed of a first and a second subunit capable of stable association comprising one or more amino acid substitution that reduces the binding affinity of the antigen binding molecule to an Fc receptor and/or effector function.

[0786] 18. The bispecific agonistic CD28 antigen binding molecule of any one of paras 1 to 16, comprising

[0787] (a) a first Fab fragment capable of specific binding to CD28,

[0788] (b) a second Fab fragment capable of specific binding to a tumor-associated antigen, and

[0789] (c) a Fc domain composed of a first and a second subunit capable of stable association comprising one or more amino acid substitution that reduces the binding affinity of the antigen binding molecule to an Fc receptor and/or effector function, wherein the first Fab fragment capable of specific binding to CD28 is fused at the C-terminus of the Fab heavy chain to the N-terminus of the Fab heavy chain of the second Fab fragment capable of specific binding to a tumor-associated antigen, which is in turn fused at its C-terminus to the N-terminus of one of the Fc domain subunits.

[0790] 19. The bispecific agonistic CD28 antigen binding molecule of any one of paras 1 to 16, comprising

[0791] (a) a first Fab fragment capable of specific binding to CD28,

[0792] (b) a second and a third Fab fragment capable of specific binding to a tumor-associated antigen, and

[0793] (c) a Fc domain composed of a first and a second subunit capable of stable association comprising one or more amino acid substitution that reduces the binding affinity of the antigen binding molecule to an Fc receptor and/or effector function,

[0794] wherein the first Fab fragment capable of specific binding to CD28 is fused at the C-terminus of the Fab heavy chain to the N-terminus of the Fab heavy chain of the second Fab fragment capable of specific binding to a tumor-associated antigen, which is in turn fused at its C-terminus to the N-terminus of the first Fc domain subunit, and the third Fab fragment capable of specific binding to a tumor-associated antigen is fused at the C-terminus of the Fab heavy chain to the N-terminus of the second Fc domain subunit.

[0795] 20. The bispecific agonistic CD28 antigen binding molecule of any one of paras 1 to 16, comprising

[0796] (a) a Fab fragment capable of specific binding to CD28,

[0797] (b) a VH and VL domain capable of specific binding to a tumor-associated antigen, and

[0798] (c) a Fc domain composed of a first and a second subunit capable of stable association comprising one or more amino acid substitution that reduces the binding affinity of the antigen binding molecule to an Fc receptor and/or effector function,

wherein the Fab fragment capable of specific binding to CD28 is fused at its C-terminus to the N-terminus of the first Fc domain subunit, and wherein one of the VH and VL domain capable of specific binding to a tumor-associated antigen is fused via a peptide linker to the C-terminus of the first Fc domain subunit and the other one of the VH and VL domain capable of specific binding to a tumor-associated antigen is fused via a peptide linker to the C-terminus of the second Fc domain subunit.

[0799] 21. A polynucleotide encoding the bispecific agonistic CD28 antigen binding molecule of any one of paras 1 to 20.

[0800] 22. A host cell comprising the polynucleotide of claim 21.

[0801] 23. A method of producing the bispecific agonistic CD28 antigen binding molecule of any one of paras 1 to 20 comprising culturing the host cell of claim 22 under conditions suitable for the expression of the bispecific antigen binding molecule.

[0802] 24. A pharmaceutical composition comprising the bispecific agonistic CD28 antigen binding molecule of any one of paras 1 to 20 and at least one pharmaceutically acceptable excipient.

[0803] 25. The pharmaceutical composition of para 24 for use in the treatment of cancer.

[0804] 26. The bispecific agonistic CD28 antigen binding molecule of any one of paras 1 to 20, or the pharmaceutical composition of para 24, for use as a medicament.

[0805] 27. The bispecific agonistic CD28 antigen binding molecule of any one of paras 1 to 20, or the pharmaceutical composition of para 24, for use in the treatment of cancer.

[0806] 28. The bispecific agonistic CD28 antigen binding molecule of any one of paras 1 to 20 for use in the treatment of cancer, wherein the agonistic CD28 antigen binding molecule is administered in combination with a chemotherapeutic agent, radiation therapy and/or other agents for use in cancer immunotherapy.

[0807] 29. Use of the bispecific agonistic CD28 antigen binding molecule of any one of paras 1 to 20, or the pharmaceutical composition of para 24, in the manufacture of a medicament for the treatment of cancer.

[0808] 30. A method of inhibiting the growth of tumor cells in an individual comprising administering to the individual an effective amount of the bispecific agonistic CD28 antigen binding molecule of any one of paras 1 to 20, or the pharmaceutical composition of para 24, to inhibit the growth of the tumor cells.

[0809] 31. A method of treating cancer comprising administering to the individual a therapeutically effective amount of the bispecific agonistic CD28 antigen binding molecule of any one of paras 1 to 20, or the pharmaceutical composition of para 24.

[0810] 32. A bispecific agonistic CD28 antigen binding molecule comprising an antigen binding domain capable of specific binding to CD28, an antigen binding domain capable of specific binding to a B cell surface antigen, and a Fc domain composed of a first and a second subunit capable of stable association comprising one or more amino acid substitution that reduces the binding affinity of the antigen binding molecule to an Fc receptor and/or effector function.

[0811] 33. The bispecific agonistic CD28 antigen binding molecule of para 32, characterized by monovalent binding to CD28.

[0812] 34. The bispecific agonistic CD28 antigen binding molecule of para 32, further characterized by monovalent binding to the B cell surface antigen.

[0813] 35. The bispecific agonistic CD28 antigen binding molecule of any one of paras 32 to 34, wherein the Fc domain is of human IgG1 subclass and comprises the amino acid mutations L234A, L235A and P329G (numbering according to Kabat EU index).

[0814] 36. The bispecific agonistic CD28 antigen binding molecule of any one of paras 32 to 35, wherein the antigen binding domain capable of specific binding to CD28 comprises

(i) a heavy chain variable region (V_{H}CD28) comprising a heavy chain complementary determining region CDR-H1 of SEQ ID NO: 20, a CDR-H2 of SEQ ID NO: 21, and a CDR-H3 of SEQ ID NO: 22, and a light chain variable region (V_{L}CD28) comprising a light chain complementary determining region CDR-L1 of SEQ ID NO: 23, a CDR-L2 of SEQ ID NO: 24 and a CDR-L3 of SEQ ID NO: 25; or
(ii) a heavy chain variable region (V_{H}CD28) comprising a CDR-H1 of SEQ ID NO: 36, a CDR-H2 of SEQ ID NO: 37, and a CDR-H3 of SEQ ID NO: 38, and a light chain variable region (V_{L}CD28) comprising a CDR-L1 of SEQ ID NO: 39, a CDR-L2 of SEQ ID NO: 40 and a CDR-L3 of SEQ ID NO: 41.

[0815] 37. The bispecific agonistic CD28 antigen binding molecule of any one of paras 32 to 36, wherein the antigen binding domain capable of specific binding to CD28 comprises a heavy chain variable region (V_{H}CD28) comprising a CDR-H1 of SEQ ID NO:20, a CDR-H2 of SEQ ID NO:21, and a CDR-H3 of SEQ ID NO:22, and a light chain variable region (V_{L}CD28) comprising a CDR-L1 of SEQ ID NO:23, a CDR-L2 of SEQ ID NO: 24 and a CDR-L3 of SEQ ID NO:25.

[0816] 38. The bispecific agonistic CD28 antigen binding molecule of any one of paras 32 to 37, wherein the antigen binding domain capable of specific binding to CD28 comprises a heavy chain variable region (V_{H}CD28) comprising an amino acid sequence that is at least about 95%, 96%, 97%, 98%, 99% or 100% identical to the amino acid sequence of SEQ ID NO:26, and a light chain variable region (V_{L}CD28) comprising an amino acid sequence that is at least about 95%, 96%, 97%, 98%, 99% or 100% identical to the amino acid sequence of SEQ ID NO:27.

[0817] 39. The bispecific agonistic CD28 antigen binding molecule of any one of paras 32 to 36, wherein the antigen binding domain capable of specific binding to CD28 comprises a heavy chain variable region (V_{H}CD28) comprising an amino acid sequence selected from the group consisting of SEQ ID NO:42, SEQ ID NO:43, SEQ ID NO:44, SEQ ID NO:45, SEQ ID NO:46, SEQ ID NO:47, SEQ ID NO:48, SEQ ID NO:49, SEQ ID NO:50 and SEQ ID NO:51, and a light chain variable region (V_{L}CD28) comprising an amino acid sequence selected from the group consisting of SEQ ID NO:27, SEQ ID NO:52, SEQ ID NO:53, SEQ ID NO:54, SEQ ID NO:55, SEQ ID NO:56, SEQ ID NO:57, SEQ ID NO:58, SEQ ID NO:59, SEQ ID NO:60 and SEQ ID NO:61.

[0818] 40. The bispecific agonistic CD28 antigen binding molecule of any one of paras 32 to 36 or 39, wherein the antigen binding domain capable of specific binding to CD28 comprises

[0819] (a) a heavy chain variable region (V_{H}CD28) comprising the amino acid sequence of SEQ ID NO:47 and a light chain variable region (V_{L}CD28) comprising the amino acid sequence of SEQ ID NO:54, or

[0820] (b) a heavy chain variable region (V_{H}CD28) comprising the amino acid sequence of SEQ ID NO:47 and a light chain variable region (V_{L}CD28) comprising the amino acid sequence of SEQ ID NO:27, or

[0821] (c) a heavy chain variable region (V_{H}CD28) comprising the amino acid sequence of SEQ ID NO:51 and a light chain variable region (V_{L}CD28) comprising the amino acid sequence of SEQ ID NO:61, or

[0822] (d) a heavy chain variable region (V_{H}CD28) comprising the amino acid sequence of SEQ ID NO:48 and a light chain variable region (V_{L}CD28) comprising the amino acid sequence of SEQ ID NO:53, or

[0823] (e) a heavy chain variable region (V_{H}CD28) comprising the amino acid sequence of SEQ ID NO:48 and a light chain variable region (V_{L}CD28) comprising the amino acid sequence of SEQ ID NO:54, or

[0824] (f) a heavy chain variable region (V_{H}CD28) comprising the amino acid sequence of SEQ ID NO:48 and a light chain variable region (V_{L}CD28) comprising the amino acid sequence of SEQ ID NO:59, or

[0825] (g) a heavy chain variable region (V_{H}CD28) comprising the amino acid sequence of SEQ ID NO:48 and a light chain variable region (V_{L}CD28) comprising the amino acid sequence of SEQ ID NO:27, or

[0826] (h) a heavy chain variable region (V_{H}CD28) comprising the amino acid sequence of SEQ ID NO:43 and a light chain variable region (V_{L}CD28) comprising the amino acid sequence of SEQ ID NO:27, or

[0827] (i) a heavy chain variable region (V_{H}CD28) comprising the amino acid sequence of SEQ ID NO:42 and a light chain variable region (V_{L}CD28) comprising the amino acid sequence of SEQ ID NO:53, or

[0828] (j) a heavy chain variable region (V_{H}CD28) comprising the amino acid sequence of SEQ ID NO:42 and a light chain variable region (V_{L}CD28) comprising the amino acid sequence of SEQ ID NO:59, or

[0829] (k) a heavy chain variable region (V_{H}CD28) comprising the amino acid sequence of SEQ ID NO:42 and a light chain variable region (V_{L}CD28) comprising the amino acid sequence of SEQ ID NO:27.

[0830] 41. The bispecific agonistic CD28 antigen binding molecule of any one of paras 32 to 36 or 39 or 40, wherein the antigen binding domain capable of specific binding to CD28 comprises a heavy chain variable region (V_{H}CD28) comprising the amino acid sequence of SEQ ID NO:46 and a light chain variable region (V_{L}CD28) comprising the amino acid sequence of SEQ ID NO:53, or a heavy chain variable region (V_{H}CD28) comprising the amino acid sequence of SEQ ID NO:47 and a light chain variable region (V_{L}CD28) comprising the amino acid sequence of SEQ ID NO:54, or a heavy chain variable region (V_{H}CD28) comprising the amino acid sequence of SEQ ID NO:47 and a light chain variable region (V_{L}CD28) comprising the amino acid sequence of SEQ ID NO:9, or a heavy chain variable region (V_{H}CD28) comprising the amino acid sequence of SEQ ID NO: 16 and a light chain variable region (V_{L}CD28) comprising the amino acid sequence of SEQ ID NO:9.

[0831] 42. The bispecific agonistic CD28 antigen binding molecule of any one of paras 32 to 41, wherein the B cell surface antigen is selected from the group consisting of CD19, CD79b, CD20, CD22 and CD37.

[0832] 43. The bispecific agonistic CD28 antigen binding molecule of any one of paras 32 to 42, wherein the antigen binding domain capable of specific binding to a B cell surface antigen is an antigen binding domain capable of specific binding to CD19.

[0833] 44. The bispecific agonistic CD28 antigen binding molecule of any one of paras 32 to 43, wherein the antigen binding domain capable of specific binding to CD19 comprises

(a) a heavy chain variable region (V_{H}CD19) comprising (i) CDR-H1 comprising the amino acid sequence of SEQ ID NO:406, (ii) CDR-H2 comprising the amino acid sequence of SEQ ID NO:407, and (iii) CDR-H3 comprising the amino acid sequence of SEQ ID NO:408, and a light chain variable region (V_{L}CD19) comprising (iv) CDR-L1 comprising the amino acid sequence of SEQ ID NO:409, (v) CDR-L2 comprising the amino acid sequence of SEQ ID NO:410, and (vi) CDR-L3 comprising the amino acid sequence of SEQ ID NO:411, or
(b) a heavy chain variable region (V_{H}CD19) comprising (i) CDR-H1 comprising the amino acid sequence of SEQ ID NO:414, (ii) CDR-H2 comprising the amino acid sequence of SEQ ID NO:415, and (iii) CDR-H3 comprising the amino acid sequence of SEQ ID NO:416, and a light chain variable region (V_{L}CD19) comprising (iv) CDR-L1 comprising the amino acid sequence of SEQ ID NO:417, (v) CDR-L2 comprising the amino acid sequence of SEQ ID NO:418, and (vi) CDR-L3 comprising the amino acid sequence of SEQ ID NO:419.

[0834] 45. The bispecific agonistic CD28 antigen binding molecule of any one of paras 32 to 44, wherein the antigen binding domain capable of specific binding to CD19 comprises

(a) a heavy chain variable region (V_{H}CD19) comprising an amino acid sequence that is at least about 95%, 98% or 100% identical to the amino acid sequence of SEQ ID NO:412, and a light chain variable region (V_{L}CD19) comprising an amino acid sequence that is at least about 95%, 98% or 100% identical to the amino acid sequence of SEQ ID NO:413, or
(b) a heavy chain variable region (V_{H}CD19) comprising an amino acid sequence that is at least about 95%, 98% or 100% identical to the amino acid sequence of SEQ ID NO:420, and a light chain variable region (V_{L}CD19) comprising an amino acid sequence that is at least about 95%, 98% or 100% identical to the amino acid sequence of SEQ ID NO:421.

[0835] 46. The bispecific agonistic CD28 antigen binding molecule of any one of paras 32 to 45, wherein the antigen binding domain capable of specific binding to CD19 comprises a heavy chain variable region (V_{H}CD19) comprising an amino acid sequence of SEQ ID NO:412 and a light chain variable region (V_{L}CD19) comprising an amino acid sequence of SEQ ID NO:413.

[0836] 47. The bispecific agonistic CD28 antigen binding molecule of any one of paras 32 to 43, wherein the antigen binding domain capable of specific binding to a B cell surface antigen is an antigen binding domain capable of specific binding to CD79b.

[0837] 48. The bispecific agonistic CD28 antigen binding molecule of any one of paras 32 to 43 or 47, wherein the antigen binding domain capable of specific binding to CD79b comprises a heavy chain variable region (V_{H}CD79b) comprising (i) CDR-H1 comprising the amino acid sequence of SEQ ID NO:422, (ii) CDR-H2 comprising the amino acid sequence of SEQ ID NO:423, and (iii) CDR-H3 comprising the amino acid sequence of SEQ ID NO:424, and a light chain variable region (V_{L}CD79b) comprising (iv) CDR-L1 comprising the amino acid sequence of SEQ ID NO:425, (v) CDR-L2 comprising the amino acid sequence of SEQ ID NO:426, and (vi) CDR-L3 comprising the amino acid sequence of SEQ ID NO:427.

[0838] 49. The bispecific agonistic CD28 antigen binding molecule of any one of paras 32 to 43 or 47 or 48, wherein the antigen binding domain capable of specific binding to CD79b comprises a heavy chain variable region (V_{H}CD79b) comprising an amino acid sequence that is at least about 95%, 98%, or 100% identical to the amino acid sequence of SEQ ID NO:428, and a light chain variable region (V_{L}CD79b) comprising an amino acid sequence that is at least about 95%, 98% or 100% identical to the amino acid sequence of SEQ ID NO:429.

[0839] 50. The bispecific agonistic CD28 antigen binding molecule of any one of paras 32 to 49, comprising

[0840] (a) one Fab fragment capable of specific binding to CD28,

[0841] (b) one crossFab fragment capable of specific binding to a B cell surface antigen, and

[0842] (c) Fc domain composed of a first and a second subunit capable of stable association comprising one or more amino acid substitution that reduces the binding affinity of the antigen binding molecule to an Fc receptor and/or effector function.

[0843] 51. The bispecific agonistic CD28 antigen binding molecule of any one of paras 32 to 49, comprising

[0844] (a) a first Fab fragment capable of specific binding to CD28,

[0845] (b) a second Fab fragment capable of specific binding to a B cell surface antigen, and

[0846] (c) a Fc domain composed of a first and a second subunit capable of stable association comprising one or more amino acid substitution that reduces the binding affinity of the antigen binding molecule to an Fc receptor and/or effector function,

[0847] wherein the first Fab fragment capable of specific binding to CD28 is fused at the C-terminus of the Fab heavy chain to the N-terminus of the Fab heavy chain of the second Fab fragment capable of specific binding to a tumor-associated antigen, which is in turn fused at its C-terminus to the N-terminus of one of the Fc domain subunits.

[0848] 52. The bispecific agonistic CD28 antigen binding molecule of any one of paras 32 to 49, comprising

[0849] (a) a first Fab fragment capable of specific binding to CD28,

[0850] (b) a second and a third Fab fragment capable of specific binding to a B cell surface antigen, and

[0851] (c) a Fc domain composed of a first and a second subunit capable of stable association comprising one or more amino acid substitution that reduces the binding affinity of the antigen binding molecule to an Fc receptor and/or effector function,

[0852] wherein the first Fab fragment capable of specific binding to CD28 is fused at the C-terminus of the Fab heavy chain to the N-terminus of the Fab heavy chain of the second Fab fragment capable of specific binding to a tumor-associated antigen, which is in turn fused at its C-terminus to the N-terminus of the first Fc domain subunit, and the third Fab fragment capable of specific binding to a tumor-associated antigen is fused at the C-terminus of the Fab heavy chain to the N-terminus of the second Fc domain subunit.

[0853] 53. A pharmaceutical composition comprising the bispecific agonistic CD28 antigen binding molecule of any one of paras 32 to 52 and at least one pharmaceutically acceptable excipient.

[0854] 54. A polynucleotide encoding the bispecific agonistic CD28 antigen binding molecule of any one of paras 32 to 52.

[0855] 55. A vector comprising the polynucleotide of para 54.

[0856] 56. A host cell comprising the vector of para 55 or the polynucleotide of para 54.

[0857] 57. A method of producing the bispecific agonistic CD28 antigen binding molecule of any one of paras 32 to 52 comprising culturing the host cell of para 25 under conditions suitable for the expression of the bispecific antigen binding molecule.

[0858] 58. The bispecific agonistic CD28 antigen binding molecule of any one of paras 32 to 52, or the pharmaceutical composition of para 53, for use as medicament.

[0859] 59. The bispecific agonistic CD28 antigen binding molecule of any one of paras 32 to 52, or the pharmaceutical composition of para 53, for use in the treatment of cancer.

[0860] 60. The bispecific agonistic CD28 antigen binding molecule of any one of paras 32 to 52 for use in the treatment of cancer, wherein the agonistic CD28 antigen binding molecule is for use in combination with a chemotherapeutic agent, radiation therapy and/or other agents for use in cancer immunotherapy.

[0861] 60. The bispecific agonistic CD28 antigen binding molecule of any one of paras 32 to 52 for use in the treatment of cancer, wherein the agonistic CD28 antigen binding molecule is for use in combination with a T-cell activating anti-CD3 bispecific antibody.

[0862] 61. The bispecific agonistic CD28 antigen binding molecule of any one of paras 32 to 52 for use in the treatment of cancer, wherein the agonistic CD28 antigen binding molecule is for use in combination with an anti-CD20/anti-CD3 bispecific antibody.

[0863] 62. The bispecific agonistic CD28 antigen binding molecule of any one of paras 32 to 52 for use in the treatment of cancer, wherein the agonistic CD28 antigen binding molecule is for use in combination with an agent blocking PD-L1/PD-1 interaction.

[0864] 63. Use of the bispecific agonistic CD28 antigen binding molecule of any one of paras 32 to 52, or the pharmaceutical composition of para 53, in the manufacture of a medicament for the treatment of cancer.

[0865] 64. A method of inhibiting the growth of tumor cells in an individual comprising administering to the individual an effective amount of the bispecific agonistic CD28 antigen binding molecule of any one of paras 32 to 52, or the pharmaceutical composition of para 53, to inhibit the growth of the tumor cells.

[0866] 65. A method of treating cancer comprising administering to the individual a therapeutically effective amount of the bispecific agonistic CD28 antigen binding molecule of any one of paras 32 to 52, or the pharmaceutical composition of para 53.

### EXAMPLES

[0867] The following are examples of methods and compositions of the invention. It is understood that various other embodiments may be practiced, given the general description provided above.

[0868] Recombinant DNA Techniques

[0869] Standard methods were used to manipulate DNA as described in Sambrook et al., Molecular cloning: A laboratory manual; Cold Spring Harbor Laboratory Press, Cold Spring Harbor, N.Y., 1989. The molecular biological reagents were used according to the manufacturer's instructions. General information regarding the nucleotide sequences of human immunoglobulin light and heavy chains is given in: Kabat, E. A. et al., (1991) Sequences of Proteins of Immunological Interest, Fifth Ed., NIH Publication No 91-3242.

[0870] DNA Sequencing

[0871] DNA sequences were determined by double strand sequencing.

[0872] Gene Synthesis

[0873] Desired gene segments, where required, were either generated by PCR using appropriate templates or were synthesized at Geneart AG (Regensburg, Germany) or Genscript (New Jersey, USA) from synthetic oligonucleotides and PCR products by automated gene synthesis. The gene segments flanked by singular restriction endonuclease cleavage sites were cloned into standard cloning/sequencing vectors. The plasmid DNA was purified from transformed bacteria and concentration determined by UV spectroscopy. The DNA sequence of the subcloned gene fragments was confirmed by DNA sequencing. Gene segments were designed with suitable restriction sites to allow subcloning into the respective expression vectors. All constructs were designed with a 5′-end DNA sequence coding for a leader peptide which targets proteins for secretion in eukaryotic cells.

[0874] Cell Culture Techniques

[0875] Standard cell culture techniques were used as described in Current Protocols in Cell Biology (2000), Bonifacino, J. S., Dasso, M., Harford, J. B., Lippincott-Schwartz, J. and Yamada, K. M. (eds.), John Wiley & Sons, Inc.

[0876] Protein Purification

[0877] Proteins were purified from filtered cell culture supernatants referring to standard protocols. In brief, antibodies were applied to a Protein A Sepharose column (GE healthcare) and washed with PBS. Elution of antibodies was achieved at pH 2.8 followed by immediate neutralization of the sample. Aggregated protein was separated from monomeric antibodies by size exclusion chromatography (Superdex 200, GE Healthcare) in PBS or in 20 mM Histidine, 150 mM NaCl pH 6.0. Monomeric antibody fractions were pooled, concentrated (if required) using e.g., a MILLIPORE Amicon Ultra (30 MWCO) centrifugal concentrator, frozen and stored at −20° C. or −80° C. Part of the samples were provided for subsequent protein analytics and analytical characterization e.g. by SDS-PAGE, size exclusion chromatography (SEC) or mass spectrometry.

[0878] SDS-PAGE

[0879] The NuPAGE® Pre-Cast gel system (Invitrogen) was used according to the manufacturer's instruction. In particular, 10% or 4-12% NuPAGE® Novex® Bis-TRIS Pre-Cast gels (pH 6.4) and a NuPAGE® MES (reduced gels, with NuPAGE® Antioxidant running buffer additive) or MOPS (non-reduced gels) running buffer was used.

[0880] Analytical Size Exclusion Chromatography

[0881] Size exclusion chromatography (SEC) for the determination of the aggregation and oligomeric state of antibodies was performed by HPLC chromatography. Briefly, Protein A purified antibodies were applied to a Tosoh TSKgel G3000SW column in 300 mM NaCl, 50 mM KH₂PO₄/K₂HPO₄, pH 7.5 on an Agilent HPLC 1100 system or to a Superdex 200 column (GE Healthcare) in 2×PBS on a Dionex HPLC-System. The eluted protein was quantified by UV absorbance and integration of peak areas. BioRad Gel Filtration Standard 151-1901 served as a standard.

[0882] Mass Spectrometry

[0883] This section describes the characterization of the multispecific antibodies with VH/VL exchange (VH/VL CrossMabs) with emphasis on their correct assembly. The expected primary structures were analyzed by electrospray ionization mass spectrometry (ESI-MS) of the deglycosylated intact CrossMabs and deglycosylated/plasmin digested or alternatively deglycosylated/limited LysC digested CrossMabs.

[0884] The VH/VL CrossMabs were deglycosylated with N-Glycosidase F in a phosphate or Tris buffer at 37° C. for up to 17 h at a protein concentration of 1 mg/ml. The plasmin or limited LysC (Roche) digestions were performed with 100 μg deglycosylated VH/VL CrossMabs in a Tris buffer pH 8 at room temperature for 120 hours and at 37° C. for 40 min, respectively. Prior to mass spectrometry the samples were desalted via HPLC on a Sephadex G25 column (GE Healthcare). The total mass was determined via ESI-MS on a maXis 4G UHR-QTOF MS system (Bruker Daltonik) equipped with a TriVersa NanoMate source (Advion).

[0885] Determination of Binding and Binding Affinity of Multispecific Antibodies to the Respective Antigens Using Surface Plasmon Resonance (SPR) (BIACORE)

[0886] Binding of the generated antibodies to the respective antigens is investigated by surface plasmon resonance using a BIACORE instrument (GE Healthcare Biosciences AB, Uppsala, Sweden). Briefly, for affinity measurements Goat-Anti-Human IgG, JIR 109-005-098 antibodies are immobilized on a CM5 chip via amine coupling for presentation of the antibodies against the respective antigen. Binding is measured in HBS buffer (HBS-P (10 mM HEPES, 150 mM NaCl, 0.005% Tween 20, ph 7.4), 25° C. (or alternatively at 37° C.). Antigen (R&D Systems or in house purified) was added in various concentrations in solution. Association was measured by an antigen injection of 80 seconds to 3 minutes; dissociation was measured by washing the chip surface with HBS buffer for 3-10 minutes and a KD value was estimated using a 1:1 Langmuir binding model. Negative control data (e.g. buffer curves) are subtracted from sample curves for correction of system intrinsic baseline drift and for noise signal reduction. The respective Biacore Evaluation Software is used for analysis of sensorgrams and for calculation of affinity data.

### Example 1

### Generation and Production of Bispecific Antigen Binding Molecules Targeting CD28 and Fibroblast Activation Protein (FAP) or Carcinoembryonic Antigen (CEA)

### 1.1 Cloning of Bispecific Antigen Binding Molecules Targeting CD28 and Fibroblast Activation Protein (FAP) or Carcinoembryonic Antigen (CEA)

[0887] Cloning of the Antigen:

[0888] A DNA fragment encoding the extracellular domain (amino acids 1 to 134 of matured protein) of human CD28 (Uniprot: P 10747) was inserted in frame into two different mammalian recipient vectors upstream of a fragment encoding a hum IgG1 Fc fragment which serves as solubility- and purification tag. One of the expression vectors contained the “hole” mutations in the Fc region, the other one the “knob” mutations as well as a C-terminal avi tag (GLNDIFEAQKIEWHE, SEQ ID NO:387) allowing specific biotinylation during co-expression with Bir A biotin ligase. In addition, both Fc fragments contained the PG-LALA mutations. Both vectors were co-transfected in combination with a plasmid coding for the BirA biotin ligase in order to get a dimeric CD28-Fc construct with a monovalent biotinylated avi-tag at the C-terminal end of the Fc-knob chain.

[0889] The variable domains of the FAP clone 4B9, a CEA binder and the CD28 clones SA and mAb 9.3 were used for the generation of various tumor targeted CD28 constructs. The generation and preparation of FAP clone 4B9 is disclosed in WO 2012/020006 A2, which is incorporated herein by reference. The CEA clone used in the molecules is described in WO 2007/071422 and the CD28 superagonistic antibody (SA) with a VH comprising the amino acid sequence of SEQ ID NO:26 and a VL comprising the amino acid sequence of SEQ ID NO:27 is described in WO 2006/050949. A description of antibody mAb 9.3 can be found in Tan et al.. J. Immunology 2002, 169, 1119-1125. For the generation of the respective expression plasmids, the sequences of the respective variable domains were used and sub-cloned in frame with the respective constant regions which are pre-inserted in the respective recipient mammalian expression vector. A schematic description of the resulting molecules is shown in FIGS. 1A to 1M. Where indicated, Pro329Gly, Leu234Ala and Leu235Ala mutations (PG-LALA) have been introduced in the constant region of the human IgG1 heavy chains to abrogate binding to Fc gamma receptors. For the generation of unsymmetric bispecific antibodies, Fc-fragments contained either the “knob” or “hole” mutations to avoid mispairing of the heavy chains. In order to avoid mispairing of light chains in bi- and multispecific antibody constructs, exchange of VH/VL or CH1/Ckappa domains was introduced in one binding moiety (CrossFab technology). In another binding moiety, charges were introduced into the CH1 and Ckappa domains.

[0890] The following molecules were cloned, a schematic illustration thereof is shown in FIGS. 1A to 1M:

Molecule A: CD28(SA) (hu IgG4), TGN1412, CD28 (SA) antibody in a human IgG4 isotype (FIG. 1A), comprises the amino acid sequences of SEQ ID NO:62 and SEQ ID NO:63 (P1AE1975).
Molecule B: CD28(SA) (PG-LALA), CD28 (SA) antibody in a huIgG1 PG-LALA isotype (FIG. 1B) comprises the amino acid sequences of SEQ ID NO:62 and SEQ ID NO:64 (P1AD9289).
Molecule C: FAP(4B9)-CD28(SA) 1+1 format, bispecific huIgG1 PG-LALA CrossFab molecule with charged modifications in the CD28(SA) Fab fragment (knob) and VH/VL exchange in FAP(4B9) Fab fragment (hole) (FIG. 1C) comprising the amino acid sequences of SEQ ID NOs: 65, 66, 67 and 68 (P1AD4492).
Molecule D: FAP(4B9)-CD28(SA) 1+4 format, bispecific tetravalent anti-CD28 (SA) and monovalent anti-FAP huIgG1 PG-LALA construct. The VH and VL domains of the FAP clone 4B9 were fused to the C-terminal end of respective chains of the Fc domain (VH: knob chain, VL: hole chain) (FIG. 1F). The molecule comprises the amino acid sequences of SEQ ID NOs: 62, 69 and 70 (P1AD9018).
Molecule E: FAP(4B9)-CD28(SA) 1+2 format, bispecific bivalent anti-CD28 (SA) and monovalent anti-FAP huIgG1 PG-LALA construct. The VH and VL domains of the FAP clone 4B9 were fused to the C-terminal end of respective chains of the Fc domain (VH: knob chain, VL: hole chain) (FIG. 1D). The molecule comprises the amino acid sequences of SEQ ID NOs: 62, 71 and 72 (P1AD9011).
Molecule F: FAP(4B9)-CD28(SA) 2+2, bispecific bivalent anti-CD28 (SA) and bivalent anti-FAP huIgG1 PG-LALA CrossFab construct, charged modifications in the anti-CD28 Fab fragments, VH fusion of the anti-FAP CrossFab fragments with CH1/Ckappa exchange to the C-terminal end of the Fc fragment (FIG. 1E). The molecule comprises the amino acid sequences of SEQ ID NOs:65, 73 and 74 (P1AD4493).
Molecule G: FAP (4B9)-CD28 (SA) 2+1, bispecific monovalent anti-CD28 (SA) and bivalent anti-FAP huIgG1 PG-LALA CrossFab construct, “classical orientation”, VH/VL exchange in the anti-CD28 CrossFab fragment, charged modification in anti-FAP Fab fragments (FIG. 1L). The molecule comprises the amino acid sequences of SEQ ID NOs: 75, 76, 77 and 78 (P1AD5231).
Molecule H: FAP(4B9)-CD28(SA)C-01, 1+1 bispecific monovalent anti-CD28 (SA) and monovalent anti-FAP huIgG1 PG-LALA CrossFab molecule, “head-to-tail”, VH/VL exchange in anti-CD28 CrossFab fragment, charged modification in anti-FAP binder (FIG. 1M). The molecule comprises the amino acid sequences of SEQ ID NOs: 75, 77, 78 and 79 (P1AE2021).
Molecule I: FAP(4B9)-CD28(SA)C-04, 1+1 bispecific monovalent anti-CD28 (SA) and monovalent anti-FAP huIgG1 PG-LALA construct. The VH and VL domains of the FAP binder 4B9 were fused to the C-terminal end of respective chains of the Fc fragment (VH: knob chain, VL: hole chain) (FIG. 1K). The molecule comprises the amino acid sequences of SEQ ID NOs: SEQ ID NO: 62, 72 and 80 (P1AE2236).
Molecule J: CEA-CD28(SA) 2+2, bispecific bivalent anti-CD28 (SA) and bivalent anti-CEA huIgG1 PG-LALA CrossFab construct, charged modifications in the anti-CD28 Fab fragments, VH fusion of the anti-CEA CrossFab fragment with CH1/Ckappa exchange to the C-terminal end of the Fc fragment (FIG. 11H). The molecule comprises the amino acid sequences of SEQ ID NOs: 65, 81 and 82 (P1AE1195).
Molecule K: CEA-CD28(SA) 1+2, bispecific bivalent anti-CD28 (SA) and monovalent anti-CEA huIgG1 PG-LALA construct. The VH and VL domains of the CEA binder were fused to the C-terminal end of respective chains of the Fc fragment (VH: knob chain, VL: hole chain) (FIG. 1G). The molecule comprises the amino acid sequences of SEQ ID NOs: 62, 83 and 84 (P1AE1194).
Molecule L: monovalent IgG CD28 (SA), monovalent anti-CD28 (SA) huIgG1 PG-LALA construct, wherein the CD28 heavy chain is expressed as a “hole” Fc chain in combination with a Fc (knob) fragment (FIG. 1I). The molecule comprises the amino acid sequences of SEQ ID NOs: 65, 85 and 86 (P1AD8944).
Molecule M: CEA-CD28(SA) 1+1 format, bispecific huIgG1 PG-LALA CrossFab molecule with charged modifications in the CD28(SA) Fab fragment (knob) and VH/VL exchange in CEA crossFab fragment (hole) (FIG. 1J) comprising the amino acid sequences of SEQ ID NOs: 65, 66, 87 and 88 (P1AE3127).
Molecule N: mab 9.3 (PG-LALA), mAb9.3 clone in human IgG1 PG-LALA isotype (as in FIG. 1B). The molecule comprises the amino acid sequences of SEQ ID NOs: 89 and 90 (P1AD5142).
Molecule O: FAP(4B9)-CD28(mAb9.3)C-03, bispecific huIgG1 PG-LALA CrossFab construct with charged modifications in the mAb9.3 Fab fragment (knob) and VH/VL exchange in the anti-FAP fragment (hole) (as in FIG. 1C). The molecule comprises the amino acid sequences of SEQ ID NOs: 67, 68, 91 and 92 (P1AE2238).
Molecule P: FAP(4B9)-CD28(mAb9.3) 1+4, bispecific tetravalent anti-CD28 mAb9.3 and anti-FAP huIgG1 PG-LALA construct. The VH and VL domains of the FAP binder are fused to the C-terminal end of respective chains of the Fc fragment (VH: knob chain, VL: hole chain) (as in FIG. 1F). The molecule comprises the amino acid sequences of SEQ ID NOs: 89, 93 and 94 (P1AD8969).
Molecule Q: FAP(4B9)-CD28(mAb9.3) 1+2, bispecific bivalent anti-CD28 mAb9.3 and monovalent anti-FAP huIgG1 PG-LALA construct. The VH and VL domains of the FAP binder were fused to the C-terminal end of respective chains of the Fc fragment (VH: knob chain, VL: hole chain) (as in FIG. 1D). The molecule comprises the amino acid sequences of SEQ ID Nos: 89, 95 and 96 (P1AD8962).
Molecule R: FAP(4B9)-CD28(mAb9.3) 2+2, bispecific bivalent anti-CD28 mAb9.3 and bivalent anti-FAP huIgG1 PG-LALA CrossFab construct, charged modifications in the mAb9.3 FAP fragment, VH fusion of the anti-FAP Fab fragment with CH1/Ckappa CrossFab exchange to the C-terminal end of the Fc fragment (as in FIG. 1E). The molecule comprises the amino acid sequences of SEQ ID Nos: 97, 98 and 99 (P1AD8968).
Molecule S: FAP (4B9)-CD28(mAb9.3) 2+1, bispecific monovalent anti-CD28 (mAb9.3) and bivalent anti-FAP huIgG1 PG-LALA CrossFab construct, “classical orientation”, VH/VL exchange in the anti-CD28 (mAb9.3) CrossFab fragment, charged modification in anti-FAP Fab fragments (as in FIG. 1L). The molecule comprises the amino acid sequences of SEQ ID Nos: 76, 77, 100 and 101 (P1AD5560).
Molecule T: FAP(4B9)-CD28(mAb9.3)C-02, bispecific monovalent anti-CD28 (mAb9.3) and monovalent anti-FAP huIgG1 PG-LALA CrossFab construct, “head-to-tail”, VH/VL exchange in the anti-CD28 (mAb9.3) CrossFab fragment, charged modification in the anti-FAP fragment (as in FIG. 1M). The molecule comprises the amino acid sequences of SEQ ID Nos: 78, 79, 100 and 101 (P1AE2022).
Molecule U: FAP(4B9)-CD28(mAb9.3)C-05, bispecific monovalent anti-CD28 (mAb9.3) and monovalent anti-FAP huIgG1 PG-LALA construct. The VH and VL domains of the FAP binder 4B9 were fused to the C-terminal end of respective chains of the Fc fragment (VH: Fc knob chain, VL: Fc hole chain) (as in FIG. 1K). The molecule comprises the amino acid sequences of SEQ ID Nos: 80, 89 and 96 (P1AE2237).
Molecule V: CEA-CD28(mAb9.3) 2+2, bispecific bivalent anti-CD28 (mAb9.3) and bivalent anti-CEA huIgG1 PG-LALA CrossFab construct, charged modifications in the mAb9.3 Fab fragment, VH fusion of the anti-CEA CrossFab fragment with CH1/Ckappa exchange to the C-terminal end of the Fc fragment (as in FIG. 1H). The molecule comprises the amino acid sequences of SEQ ID Nos: 82, 89 and 102 (P1AE1193).
Molecule W: CEA-CD28(mAb9.3) 1+2, bispecific bivalent anti-CD28 (mAb9.3) and monovalent anti-CEA huIgG1 PG-LALA construct. The VH and VL domains of the CEA binder were fused to the C-terminal end of respective chains of the Fc fragment (VH: knob chain, VL: hole chain) (as in FIG. 1G). The molecule comprises the amino acid sequences of SEQ ID Nos: 89, 103 and 104 (P1AE1192).
Molecule X: monovalent IgG CD28 (mAb9.3), wherein the CD28 heavy chain is expressed as a “hole” Fc chain in combination with a Fc (knob) fragment (as in FIG. 1I). The molecule comprises the amino acid sequences of SEQ ID Nos: 86, 105 and 106 (P1AD8938).
Furthermore, a trispecific molecule was prepared:
Molecule Y, FAP (4B9)-CD28(TGN1412)-CEA 1+1+1, trispecific monovalent anti-CD28 (TGN1412), monovalent anti-FAP and monovalent anti-CEA huIgG1 PG-LALA CrossFab construct, VH/VL exchange in the anti-CEA CrossFab fragment (hole), charged modifications in the anti-FAP Fab fragment (knob) and in the anti-CD28 fragment (knob) (as in FIG. 1N). The molecule comprises the amino acid sequences of SEQ ID Nos: 87, 88, 388 and 389 (P1AE4064).

### 1.2 Production of Bispecific Antigen Binding Molecules Targeting CD28 and Fibroblast Activation Protein (FAP) or Carcinoembryonic Antigen (CEA)

[0891] Expression of the above-mentioned molecules is either driven by a chimeric MPSV promoter or a CMV promoter. Polyadenylation is driven by a synthetic polyA signal sequence located at the 3′ end of the CDS. In addition, each vector contains an EBV OriP sequence for autosomal replication.

[0892] For the production of the constructs C to W, HEK293-EBNA cells that grow in suspension were co-transfected with the respective expression vectors using polyethylenimine as a transfection reagent. Antibodies and bispecific antibodies were generated by transient transfection of HEK293 EBNA cells. Cells were centrifuged and medium replaced by pre-warmed CD CHO medium. Expression vectors were mixed in CD CHO medium, PEI was added, the solution vortexed and incubated for 10 minutes at room temperature. Afterwards, cells were mixed with the DNA/PEI solution, transferred to shake flask and incubated for 3 hours at 37° C. in an incubator with a 5% CO₂ atmosphere. After the incubation, Excell medium with supplements was added (Mammalian Cell Cultures for Biologics Manufacturing, Editors: Weichang Zhou, Anne Kantardjieff). One day after transfection supplements (Feed) were added (Mammalian Cell Cultures for Biologics Manufacturing, Editors: Weichang Zhou, Anne Kantardjieff). Cell supernatants were harvested after 7 days by centrifugation and subsequent filtration (0.2 μm filter) and purified by standard methods.

[0893] Constructs A, B and X were prepared by Evitria using their proprietary vector system with conventional (non-PCR based) cloning techniques and using suspension-adapted CHO K1 cells (originally received from ATCC and adapted to serum-free growth in suspension culture at Evitria). For the production, Evitria used its proprietary, animal-component free and serum-free media (eviGrow and eviMake2) and its proprietary transfection reagent (eviFect). Supernatant was harvested by centrifugation and subsequent filtration (0.2 μm filter) and purified by standard methods.

### 1.3 Purification of Bispecific Antigen Binding Molecules Targeting CD28 and Fibroblast Activation Protein (FAP) or Carcinoembryonic Antigen (CEA)

[0894] Proteins were purified from filtered cell culture supernatants referring to standard protocols. In brief, Fc-containing proteins were purified from cell culture supernatants by affinity chromatography using Protein A. Elution was achieved at pH 3.0 followed by immediate neutralization of the sample. The protein was concentrated and aggregated protein was separated from monomeric protein by size exclusion chromatography in 20 mM histidine, 140 mM sodium chloride, pH 6.0.

### 1.4 Analytical Data of Bispecific or Trispecific Antibodies Targeting CD28 and Fibroblast Activation Protein (FAP) or Carcinoembryonic Antigen (CEA)

[0895] The protein concentration of purified constructs was determined by measuring the optical density (OD) at 280 nm, using the mass extinction coefficient calculated on the basis of the amino acid sequence according to Pace, et al., Protein Science, 1995, 4, 2411-1423. Purity and molecular weight of the proteins were analyzed by CE-SDS in the presence and absence of a reducing agent using a LabChipGXII (Perkin Elmer). Determination of the aggregate content was performed by HPLC chromatography at 25° C. using analytical size-exclusion column (TSKgel G3000 SW XL or UP-SW3000) equilibrated in running buffer (25 mM K₂HPO₄, 125 mM NaCl, 200 mM L-Arginine Monohydrocloride, pH 6.7 or 200 mM KH₂PO₄, 250 mM KCl pH 6.2 respectively). A summary of the purification parameters of all molecules is given in Table 1.

TABLE 1
Summary of the production and purification of bispecific
or trispecific CD28 antigen binding molecules

| | | | Analytical | Purity |
|---|---|---|---|---|
| | | | SEC (HMW/ | measured |
| | | Yield | Monomer/ | by CE- |
| Molecule | Description | [mg/l] | LMW) [%] | SDS [%] |
| A | CD28(SA) | 257 | 0/100/0 | 84.25 |
| | (hu IgG4) | | | |
| B | CD28(SA) | 390 | 0/97.3/2.7 | 84 |
| | hu IgG1 | | | |
| | (PG-LALA) | | | |
| C | FAP(4B9) − | 19.5 | 0.64/97.28/2.07 | 98.75 |
| | CD28(SA) | | | |
| | 1 + 1 | | | |
| D | FAP(4B9) − | 1.75 | 3.53/96.48/0 | n.d. |
| | CD28(TGN1412) | | | |
| | 1 + 4 | | | |
| E | FAP(4B9) − | 0.38 | 0.8/95.48/3.72 | 93.58 |
| | CD28(SA) 1 + 2 | | | |
| F | FAP(4B9) − | 18.2 | 1.4/98.6/0 | 91.42 |
| | CD28(SA) 2 + 2 | | | |
| G | FAP (4B9) − | 2.66 | 3.79/94.02/2.19 | 64 |
| | CD28 (SA) 2 + 1 | | | |
| H | FAP(4B9) − | 10.6 | 0/100/0 | 99.38 |
| | CD28(SA) C-01 | | | |
| I | FAP(4B9) − | 5.55 | 4.12/81.17/14.71 | 96.5 |
| | CD28(SA) C-04 | | | |
| J | CEA − | 6.25 | 1/99/0 | n.d. |
| | CD28(SA) 2 + 2 | | | |
| K | CEA − | 5.8 | 0.5/99.5/0 | 64 |
| | CD28(SA) 1 + 2 | | | |
| L | monovalent IgG1 | 38.5 | 0.2/99.6/0.2 | 99.3 |
| | CD28 (SA) | | | |
| M | CEA − | 14.3 | 0/100/0 | 99.18 |
| | CD28(SA) 1 + 1 | | | |
| N | CD28 (mAb 9.3) | 22.06 | 0/100/0 | 88 |
| | hu IgG1 | | | |
| | (PG-LALA) | | | |
| O | FAP(4B9) − | 2.14 | 0/100/0 | 97.4 |
| | CD28(mAb9.3) | | | |
| | C-03 | | | |
| P | FAP(4B9) − | 7.6 | 1.2/98.8/0 | 97.6 |
| | CD28(mAb9.3) | | | |
| | 1 + 4 | | | |
| Q | FAP(4B9) − | 16. | 1/98.5/0.5 | 97.16 |
| | CD28(mAb9.3) | | | |
| | 1 + 2 | | | |
| R | FAP(4B9) − | 3.9 | 0/95.5/4.5 | 87 |
| | CD28(mAb9.3) | | | |
| | 2 + 2 | | | |
| S | FAP (4B9) − | 2.63 | 2.1/96.3/1.6 | 90.55 |
| | CD28 (mAb9.3) | | | |
| | 2 + 1 | | | |
| T | FAP(4B9) − | 2.3 | 0/100/0 | 100 |
| | CD28(mAb9.3) | | | |
| | C-02 | | | |
| U | FAP(4B9) − | 23.78 | 0.68/97.82/1.5 | 96.1 |
| | CD28(mAb9.3) | | | |
| | C-05 | | | |
| V | CEA − | 3.1 | 0/100/0 | 100 |
| | CD28(mAb9.3) | | | |
| | 2 + 2 | | | |
| W | CEA − | 2.25 | 0/100/0 | 92.8 |
| | CD28(mAb9.3) | | | |
| | 1 + 2 | | | |
| X | monovalent IgG1 | 20.2 | 1.4/98.6/0 | 97.7 |
| | CD28 (mAb9.3) | | | |
| Y | FAP(4B9) − | 1.57 | 0/100/0 | 100 |
| | CD28(TGN1412) − | | | |
| | CEA 1 + 1 + 1 | | | |

### Example 2

### Binding and Kinetic Analysis of Bispecific Antibodies of Bispecific Antigen Binding Molecules Targeting CD28 and Fibroblast Activation Protein (FAP) or Carcinoembryonic Antigen (CEA)

### 2.1 Binding of Bispecific Antibodies Targeting CD28 and Fibroblast Activation Protein (FAP) to FAP- or CEA- and to CD28-Expressing Cells

[0896] The binding of bispecific FAP-CD28 molecules was tested using human fibroblast activating protein (huFAP) expressing 3T3-huFAP cells (clone 19). This cell line was generated by the transfection of the mouse embryonic fibroblast NIH/3T3 cell line (ATCC CRL-1658) with the expression vector pETR4921 to express huFAP under 1.5 μg/mL Puromycin selection. The binding to human CD28 was tested with CHO cells expressing human CD28 (parental cell line CHO-k1 ATCC # CCL-61, modified to stably overexpress human CD28). The binding to human CEACAM5 was tested with CEA-expressing MKN45 cells (gastric cancer cell line, DSMZ # ACC 409).

[0897] To assess binding, cells were harvested, counted, checked for viability and re-suspended at 2.5E5/ml in FACS buffer (eBioscience, Cat No 00-4222-26). 5×10⁴ cells were incubated in round-bottom 96-well plates for 2h at 4° C. with increasing concentrations of the FAP-targeted CD28 constructs (1 pM-100 nM). Then, cells were washed three times with cold FACS buffer, incubated for further 60 min at 4° C. with PE-conjugated, goat-anti human PE (Jackson ImmunoReserach, Cat No 109-116-098), washed once with cold FACS buffer, centrifuged and resuspended in 100 μl FACS buffer. To monitor unspecific binding interactions between constructs and cells, an anti-DP47 IgG was included as negative control. Binding was assessed by flow cytometry with a FACS Fortessa (BD, Software FACS Diva). Binding curves were obtained using GraphPadPrism6.

[0898] The FAP-CD28 molecules were able to bind to both human FAP as well as human CD28 on cells in a concentration dependent manner (FIGS. 2B and 2C for certain examples). As expected, no binding was detected with the anti-DP47 IgG, indicating that the detection of binding is due to specific CD28 and FAP binding by the respective targeting moieties.

[0899] CEA-CD28 molecules were also able to bind to both human CEA as well as human CD28 on cells.

### 2.2 Kinetic Analysis of Bispecific or Trispecific Antibodies Targeting CD28 and CEA

[0900] Affinity (K_{D}) of both binding moieties of the bispecific or trispecific antibodies comprising anti-CEA (Medi-565) and anti-CD28 was measured by SPR using a ProteOn XPR36 instrument (Biorad) at 25° C. with biotinylated huCD28-Fc antigen and biotinylated Hu N(A2-B2)A-avi-His immobilized on an NLC chip by neutravidin capture.

[0901] For the generation of a CEACAM5-based antigen that contains the epitope for CEA(Medi-565), a chimeric protein consisting of two CEACAM1 and two CEACAM5 Ig domains was generated. Based on the sequence of CEACAM1, the second and third domain of CEACAM1 was replaced by the CEACAM5 domains A2 and B2. A C-terminal avi-tag and His tag were fused for site-specific biotinylation and purification. The resulting protein was named Hu N(A2-B2)A-avi-His (SEQ ID NO: 169).

[0902] Immobilization of recombinant antigens (ligand): Antigens were diluted with PBST (10 mM phosphate, 150 mM sodium chloride pH 7.4, 0.005% Tween 20) to 10 μg/ml, then injected at 30 μl/minute at varying contact times, to achieve immobilization levels of about 400, 800, and 1600 response units (RU) in vertical orientation. Injection of analytes: For one-shot kinetics measurements, injection direction was changed to horizontal orientation, two-fold dilution series of the purified bispecific CEA-targeted anti-CD28 bispecific antibody (varying concentration ranges between 50 and 3.125 nM) were injected simultaneously at 50 μl/min along separate channels 1-5, with association times of 150 s, and dissociation times of 450 s. Buffer (PBST) was injected along the sixth channel to provide an “in-line” blank for referencing. Association rate constants (kon) and dissociation rate constants (koff) were calculated using a simple one-to-one Langmuir binding model in ProteOn Manager v3.1 software by simultaneously fitting the association and dissociation sensorgrams. The equilibrium dissociation constant (K_{D}) was calculated as the ratio koff/kon. Calculated K_{D} values of a bispecific antibody comprising one anti-CD28 antigen binding domain and one anti-CEA antigen binding domain (Molecule M) are in line with the measured values of the respective monospecific constructs. The kinetic and thermodynamic data are summarized in Table 2 below.

TABLE 2
kinetic and thermodynamic analysis
of CEA-CD28(SA) 1 + 1 (Molecule M)

| Binding moiety | kₒₙ (1/(s*M) | k_{off} (1/s) | K_{D} (nM) |
|---|---|---|---|
| Anti-CEA | 4.13 exp5 | 1.2 exp-4 | 0.29 |
| Anti-CD28 (TGN1412) | 3.13 exp5 | 3.76 exp-4 | 1.2 |

### Example 3

### Generation and Characterization of CD28 (SA) Variants Devoid of Hotspots and Reduced in Affinity

### 3.1 Removal of an Unpaired Cysteine Residue, Tryptophan Residues, a Deamidation Site and Generation of Affinity-Reduced CD28 (SA) Variants

[0903] As part of our detailed binder characterization, a computational analysis of the CD28(SA) variable domain sequences was performed. This analysis revealed an unpaired cysteine in the CDR2 region of VH (position 50, Kabat numbering), tryptophan residues in CDR3 of VH (position 100a, Kabat numbering) and CDR1 of VL (position 32, Kabat numbering), and a potential asparagine deamidation site in CDR2 of VH (position 56, Kabat numbering). While oxidation of tryptophan is a rather slow process and can be prevented by adding reducing compounds, the presence of unpaired cysteines in an antibody variable domain can be critical. Free cysteines are reactive and can form stable bonds with other unpaired cysteines of other proteins or components of the cell or media. As a consequence, this can lead to a heterogeneous and instable product with unknown modifications which are potentially immunogenic and therefore may pose a risk for the patients. In addition, deamidation of asparagine and the resulting formation of iso-aspartate and succinimide can affect both in vitro stability and in vivo biological functions. A crystal structure analysis of the parental murine binder 5.11A revealed that C50 is not involved in binding to human CD28 and therefore can be replaced by a similar amino acid such as serine without affecting the affinity to CD28 (Table 6, variant 29). Both tryptophan residues as well as asparagine at position 50, however, are close to or involved in the binding interface and a replacement by a similar amino acid can therefore lead to a reduction of the binding affinity. In this example, we particularly aimed at reducing the affinity of CD28(SA) to human CD28 because of the following reason: The affinity of CD28(SA) is in the range of 1-2 nM with a binding half-life of about 32 minutes. This strong affinity can lead to a sink effect in tissue containing large amounts of CD28-expressing cells such as blood and lymphatic tissue when injected intravenously into patients. As a consequence, site-specific targeting of the compound via the targeting component(s) FAP and/or CEA may be reduced and the efficacy of the construct can be diminished. In order to minimize such an effect, several VH and VL variants were generated in order to reduce to affinities to different degrees (FIGS. 3A and 3C). Besides the previously mentioned positions that represent potential stability hotspots, additional residues involved directly or indirectly in the binding to human CD28 were replaced either by the original murine germline amino acid or by a similar amino acid. In addition, the CDRs of both CD28(SA) VL and VH were also grafted into the respective framework sequences of trastuzumab (FIGS. 3B and 3D). Several combinations of VH and VL variants were then expressed as monovalent one-armed anti-CD28 IgG-like constructs and binding was characterized by SPR.

### 3.2 Analysis of the Dissociation Rate Constants (Koff) of Reduced One-Armed Anti-CD28 Variants by SPR

[0904] In order to characterize the anti-CD28 binder variants in a first step, all binders were expressed as monovalent one-armed IgG-like constructs (FIG. 4A). This format was chosen in order to characterize the binding to CD28 in a 1:1 model. 5 days after transfection into HEK cells, the supernatant was harvested and the titer of the expressed constructs was determined.

[0905] The off-rate of the anti-CD28 binder variants was determined by surface plasmon resonance (SPR) using a ProteOn XPR36 instrument (Biorad) at 25° C. with biotinylated huCD28-Fc antigen immobilized on NLC chips by neutravidin capture. For the immobilization of recombinant antigen (ligand), huCD28-Fc was diluted with PBST (Phosphate buffered saline with Tween 20 consisting of 10 mM phosphate, 150 mM sodium chloride pH 7.4, 0.005% Tween 20) to concentrations ranging from 100 to 500 nM, then injected at 25 μl/minute at varying contact times. This resulted in immobilization levels between 1000 to 3000 response units (RU) in vertical orientation.

[0906] For one-shot kinetics measurements, injection direction was changed to horizontal orientation. Based on the titer of the produced supernatants, the monovalent one-armed IgGs were diluted with PBST to get two-fold dilution series ranging from 100 nM to 6.25 nM. Injection was performed simultaneously at 50 μl/min along separate channels 1-5, with association times of 120 s, and dissociation times of 300 s. Buffer (PBST) was injected along the sixth channel to provide an “in-line” blank for referencing. Since the binding interaction was measured with monovalent one-armed IgGs from supernatant without purification and biochemical characterization, only the off-rates of the protein:protein interaction was used for further conclusions. Off-rates were calculated using a simple one-to-one Langmuir binding model in ProteOn Manager v3.1 software by fitting the dissociation sensorgrams. The dissociation rate constants (koff) values of all clones are summarized in Table 3. Comparison of the produced variants revealed koff values with an up to 30-fold decrease compared to the parental sequence.

TABLE 3
Summary of all expressed monovalent anti-CD28 variants
with dissociation rate constants (k_{off}) values

| | | SEQ | SEQ | SEQ | |
|---|---|---|---|---|---|
| | | ID | ID | ID | k_{off} |
| Binder variants | Tapir ID | NO: | NO: | NO: | (10⁻⁴/M) |
| CD28(SA)_variant_1 | P1AE4441 | 112 | 65 | 126 | 3.0 |
| (parental CD28) | | | | | |
| CD28(SA)_variant_2 | P1AE3058 | 113 | 120 | 126 | N/A |
| CD28(SA)_variant_3 | P1AE3059 | 113 | 121 | 126 | N/A |
| CD28(SA)_variant_4 | P1AE3060 | 113 | 122 | 126 | N/A |
| CD28(SA)_variant_5 | P1AE3061 | 113 | 65 | 126 | N/A |
| CD28(SA)_variant_6 | P1AE3062 | 114 | 120 | 126 | N/A |
| CD28(SA)_variant_7 | P1AE3063 | 114 | 121 | 126 | 100 |
| CD28(SA)_variant_8 | P1AE3064 | 114 | 122 | 126 | 68 |
| CD28(SA)_variant_9 | P1AE3065 | 114 | 123 | 126 | 78 |
| CD28(SA)_variant_10 | P1AE3066 | 114 | 124 | 126 | N/A |
| CD28(SA)_variant_11 | P1AE3067 | 114 | 65 | 126 | 37 |
| CD28(SA)_variant_12 | P1AE3068 | 115 | 125 | 126 | 2.4 |
| CD28(SA)_variant_13 | P1AE3069 | 115 | 65 | 126 | 1.9 |
| CD28(SA)_variant_14 | P1AE3070 | 116 | 120 | 126 | 100 |
| CD28(SA)_variant_15 | P1AE3071 | 116 | 121 | 126 | 24 |
| CD28(SA)_variant_16 | P1AE3072 | 116 | 122 | 126 | 10 |
| CD28(SA)_variant_17 | P1AE3073 | 116 | 123 | 126 | 14 |
| CD28(SA)_variant_18 | P1AE3074 | 116 | 124 | 126 | 82 |
| CD28(SA)_variant_19 | P1AE3075 | 116 | 65 | 126 | 2.9 |
| CD28(SA)_variant_20 | P1AE3076 | 117 | 120 | 126 | N/A |
| CD28(SA)_variant_21 | P1AE3077 | 117 | 121 | 126 | N/A |
| CD28(SA)_variant_22 | P1AE3078 | 117 | 122 | 126 | 61 |
| CD28(SA)_variant_23 | P1AE3079 | 117 | 65 | 126 | 43 |
| CD28(SA)_variant_24 | P1AE3080 | 118 | 120 | 126 | 80 |
| CD28(SA)_variant_25 | P1AE3081 | 118 | 121 | 126 | 3.51 |
| CD28(SA)_variant_26 | P1AE3082 | 118 | 122 | 126 | 9.7 |
| CD28(SA)_variant_27 | P1AE3083 | 118 | 123 | 126 | 14 |
| CD28(SA)_variant_28 | P1AE3084 | 118 | 124 | 126 | 69 |
| CD28(SA)_variant_29 | P1AE3085 | 118 | 65 | 126 | 2.5 |
| CD28(SA)_variant_30 | P1AE3086 | 119 | 125 | 126 | 3.22 |
| CD28(SA)_variant_31 | P1AE3087 | 119 | 65 | 126 | 2.5 |

[0907] Binding to human CD28 was tested with CHO cells expressing human CD28 (parental cell line CHO-k1 ATCC # CCL-61. This binding assay is described in Example 4 below. The monovalent one-armed IgG-like CD28 variant constructs showed differences in binding as can be seen from FIGS. 4A to 4C.

### 3.3 Preparation and Kinetic Analysis of Bispecific FAP-Targeted Anti-CD28 Affinity Variants

[0908] Based on the off-rate analysis and the binding study on CD28-expressing cells, several combinations of anti-CD28 VH and VL variants with different binding intensities were selected and expressed as FAP-targeted bispecific huIgG1 PG-LALA CrossFab molecules (for combinations of SEQ ID NO:s see Table 4). The resulting constructs in 1+1 format (FIG. 4B) were purified and a biochemical analysis was performed (Table 5).

TABLE 4
Summary of all expressed 1 + 1
bispecific FAP-targeted anti-CD28 variants

| | | SEQ | SEQ | SEQ | SEQ |
|---|---|---|---|---|---|
| | | ID | ID | ID | ID |
| Binder variants | Tapir ID | NO: | NO: | NO: | NO: |
| FAP (4B9) − CD28 | P1AE3131 | 67 | 68 | 114 | 122 |
| (CD28(SA)_Variant | | | | | |
| 8) 1 + 1 | | | | | |
| FAP (4B9) − CD28 | P1AE3132 | 67 | 68 | 114 | 65 |
| (CD28(SA)_Variant | | | | | |
| 11) 1 + 1 | | | | | |
| FAP (4B9) − CD28 | P1AE3133 | 67 | 68 | 115 | 125 |
| (CD28(SA)_Variant | | | | | |
| 12) 1 + 1 | | | | | |
| FAP (4B9) − CD28 | P1AE3134 | 67 | 68 | 116 | 121 |
| (CD28(SA) Variant | | | | | |
| 15) 1 + 1 | | | | | |
| FAP (4B9) − CD28 | P1AE3135 | 67 | 68 | 116 | 122 |
| (CD28(SA)_Variant | | | | | |
| 16) 1 + 1 | | | | | |
| FAP (4B9) − CD28 | P1AE3136 | 67 | 68 | 116 | 123 |
| (CD28(SA)_Variant | | | | | |
| 17) 1 + 1 | | | | | |
| FAP (4B9) − CD28 | P1AE3137 | 67 | 68 | 116 | 65 |
| (CD28(SA)_Variant | | | | | |
| 19) 1 + 1 | | | | | |
| FAP (4B9) − CD28 | P1AE3138 | 67 | 68 | 117 | 65 |
| (CD28(SA)_Variant | | | | | |
| 23) 1 + 1 | | | | | |
| FAP (4B9) − CD28 | P1AE3139 | 67 | 68 | 118 | 121 |
| (CD28(SA)_Variant | | | | | |
| 25) 1 + 1 | | | | | |
| FAP (4B9) − CD28 | P1AE3140 | 67 | 68 | 118 | 123 |
| (CD28(SA)_Variant | | | | | |
| 27) 1 + 1 | | | | | |
| FAP (4B9) − CD28 | P1AE3141 | 67 | 68 | 118 | 65 |
| (CD28(SA)_Variant | | | | | |
| 29) 1 + 1 | | | | | |

TABLE 5
Summary of the production and purification
of FAP-targeted anti- CD28 variants

| | | | Analytical | Purity |
|---|---|---|---|---|
| | | | SEC (HMW/ | measured |
| | | Yield | Monomer/ | by CE- |
| TaPIR ID | Bispecific molecules | [mg/l] | LMW) [%] | SDS [%] |
| P1AE3131 | FAP (4B9) − CD28 | 11.8 | 0.1/98.5/1.4 | 100 |
| | (CD28(SA)_Variant | | | |
| | 8) 1 + 1 | | | |
| P1AE3132 | FAP (4B9) − CD28 | 8.1 | 0.5/97.4/2.1 | 100 |
| | (CD28(SA)_Variant | | | |
| | 11) 1 + 1 | | | |
| P1AE3133 | FAP (4B9) − CD28 | 6.1 | 0/100/0′ | 100 |
| | (CD28(SA)_Variant | | | |
| | 12) 1 + 1 | | | |
| P1AE3134 | FAP (4B9) − CD28 | 9.2 | 0/100/0 | 100 |
| | (CD28(SA)_Variant | | | |
| | 15) 1 + 1 | | | |
| P1AE3135 | FAP (4B9) − CD28 | 0.4 | 0/100/0 | 97 |
| | (CD28(SA)_Variant | | | |
| | 16) 1 + 1 | | | |
| P1AE3136 | FAP (4B9) − CD28 | 1.35 | 0/78.7/21.3 | 87 |
| | (CD28(SA)_Variant | | | |
| | 17) 1 + 1 | | | |
| P1AE3137 | FAP (4B9) − CD28 | 2.6 | 0/100/0 | 100 |
| | (CD28(SA)_Variant | | | |
| | 19) 1 + 1 | | | |
| P1AE3138 | FAP (4B9) − CD28 | 15.5 | 0/97.5/2.5 | 98 |
| | (CD28(SA)_Variant | | | |
| | 23) 1 + 1 | | | |
| P1AE3139 | FAP (4B9) − CD28 | 5.4 | 0/88.7/11.3 | 100 |
| | (CD28(SA)_Variant | | | |
| | 25) 1 + 1 | | | |
| P1AE3140 | FAP (4B9) − CD28 | 9.7 | 0/98.3/1.7 | 96 |
| | (CD28(SA)_Variant | | | |
| | 27) 1 + 1 | | | |
| P1AE3141 | FAP (4B9) − CD28 | 1.76 | 1/99/0 | 96.3 |
| | (CD28(SA)_Variant | | | |
| | 29) 1 + 1 | | | |

[0909] Affinity (K_{D}) of the produced bispecific antigen binding molecules to CD28 was measured by SPR using a ProteOn XPR36 instrument (Biorad) at 25° C. with biotinylated huCD28-Fc antigen immobilized on NLC chips by neutravidin capture. Immobilization of recombinant antigens (ligand): Antigen was diluted with PBST (10 mM phosphate, 150 mM sodium chloride pH 7.4, 0.005% Tween 20) to 10 μg/ml, then injected at 30 μl/minute at varying contact times, to achieve immobilization levels of about 200, 400 or 800 response units (RU) in vertical orientation. Injection of analytes: For one-shot kinetics measurements, injection direction was changed to horizontal orientation, two-fold dilution series of purified bispecific FAP-targeted anti-CD28 affinity variants (varying concentration ranges between 50 and 3.125 nM) were injected simultaneously at 50 μl/min along separate channels 1-5, with association times of 150 s, and dissociation times of 450 s. Buffer (PBST) was injected along the sixth channel to provide an “in-line” blank for referencing. Association rate constants (kₒₙ) and dissociation rate constants (k_{off}) were calculated using a simple one-to-one Langmuir binding model in ProteOn Manager v3.1 software by simultaneously fitting the association and dissociation sensorgrams. The equilibrium dissociation constant (K_{D}) was calculated as the ratio koff/kon. Analyzed clones revealed K_{D} values in a broad range (between 1 and 25 nM). The kinetic and thermodynamic data are summarized in Table 6.

TABLE 6
kinetic and thermodynamic analysis of expressed
FAP-targeted anti-CD28 variants

| Bispecific molecule | kₒₙ (1/(s*M) | k_{off} (1/s) | K_{D} (nM) |
|---|---|---|---|
| parental | 3.79 exp5 | 3.6 exp-4 | 1 |
| FAP (4B9) − CD28 | 2.19 exp5 | 5.21 exp-3 | 23.8 |
| (CD28(SA)_Variant 8) | | | |
| 1 + 1 | | | |
| FAP (4B9) − CD28 | 2.3 exp5 | 2.87 exp-3 | 12.5 |
| (CD28(SA)_Variant 11) | | | |
| 1 + 1 | | | |
| FAP (4B9) − CD28 | 2.6 1exp5 | 2.67 exp-4 | 1 |
| (CD28(SA)_Variant 12) | | | |
| 1 + 1 | | | |
| FAP (4B9) − CD28 | 2.59 exp5 | 1.84 exp-3 | 7.1 |
| (CD28(SA)_Variant 15) | | | |
| 1 + 1 | | | |
| FAP (4B9) − CD28 | 1.87 exp5 | 9.94 exp-4 | 5.3 |
| (CD28(SA)_Variant 16) | | | |
| 1 + 1 | | | |
| FAP (4B9) − CD28 | 3.38 exp5 | 1.25 exp-3 | 3.7 |
| (CD28(SA)_Variant 17) | | | |
| 1 + 1 | | | |
| FAP (4B9) − CD28 | 2.8 exp5 | 3.04 exp-4 | 1.1 |
| (CD28(SA)_Variant 19) | | | |
| 1 + 1 | | | |
| FAP (4B9) − CD28 | 2.11 exp5 | 3.42 exp-3 | 16.3 |
| (CD28(SA)_Variant 23) | | | |
| 1 + 1 | | | |
| FAP (4B9) − CD28 | 2.38 exp5 | 3.96 exp-4 | 1.7 |
| (CD28(SA)_Variant 25) | | | |
| 1 + 1 | | | |
| FAP (4B9) − CD28 | 2.27 exp5 | 1.21 exp-3 | 5.4 |
| (CD28(SA)_Variant 27) | | | |
| 1 + 1 | | | |
| FAP (4B9) − CD28 | 2.72 exp5 | 3.07 exp-4 | 1.1 |
| (CD28(SA)_Variant 29) | | | |
| 1 + 1 | | | |

### Example 4

[0910] Binding of monovalent CD28 agonistic IgGs and FAP-targeted CD28 agonistic antibodies to CD28-expressing and FAP-expressing cells Binding to human CD28 was tested with CHO cells expressing human CD28 (parental cell line CHO-k1 ATCC # CCL-61, modified to stably overexpress human CD28). To assess binding, cells were harvested, counted, checked for viability and re-suspended at 2.5×10⁵/ml in FACS buffer (eBioscience, Cat No 00-4222-26). 5×10⁴ cells were incubated in round-bottom 96-well plates for 2h at 4° C. with increasing concentrations of the CD28 binders (1 pM-100 nM). Then, cells were washed three times with cold FACS buffer, incubated for further 60 min at 4° C. with PE-conjugated, goat-anti human PE (Jackson ImmunoReserach, Cat No 109-116-098), washed once with cold FACS buffer, centrifuged and resuspended in 100 ul FACS buffer. To monitor unspecific binding interactions between constructs and cells, an anti-DP47 IgG was included as negative control. Binding was assessed by flow cytometry with a FACS Fortessa (BD, Software FACS Diva). Binding curves were obtained using GraphPadPrism6.

[0911] The monovalent one-armed IgG-like CD28 variant constructs showed differences in binding as can be seen from FIGS. 4A to 4C. Furthermore, the binding of bispecific FAP-targeted anti-CD28 antibodies in 1+1 format to CHO cells expressing human CD28 was determined. The K_{D} values for the different 1+1 constructs with selected CD28 variants are shown in Table 7 below or in the corresponding graphs of FIGS. 4D and 4E.

TABLE 7
Binding of FAP-targeted anti-CD28 1 +
1 constructs to CHO cells expressing human CD28

| Binder | TAPIR | K_{D} (nM) |
|---|---|---|
| TGN1412 | P1AD4492 | 1 |
| variant 8 | P1AE3131 | 23.8 |
| variant 11 | P1AE3132 | 12.5 |
| variant 12 | P1AE3133 | 1 |
| variant 15 | P1AE3134 | 7.1 |
| variant 16 | P1AE3135 | 5.3 |
| variant 17 | P1AE3136 | 3.7 |
| variant 19 | P1AE3137 | 1.1 |
| variant 23 | P1AE3138 | 16.3 |
| variant 25 | P1AE3139 | 1.7 |
| variant 27 | P1AE3140 | 5.4 |
| variant 29 | P1AE3141 | 1.1 |

[0912] The binding of bispecific FAP-targeted anti-CD28 antibodies in 1+1 format to FAP-expressing 3T3-huFAP cells (clone 19) was also determined as described in Example 2.1 and is shown in the corresponding graphs of FIGS. 4F and 4G.

### Example 5

### Binding of CEA-Targeted CD28 Agonistic Antibodies to CD28-Expressing Cells

[0913] Binding to human CD28 was tested with CHO cells expressing human CD28 (Binding was assessed by flow cytometry with a FACS Fortessa (BD, Software FACS Diva) as described in Example 4. Binding curves were obtained using GraphPadPrism6. The binding curves for the different 1+1 constructs with selected CD28 variants are shown in FIG. 16.

### Example 6

### In Vitro Functional Characterization of Targeting CD28 and Fibroblast Activation Protein (FAP) or Carcinoembryonic Antigen (CEA)

[0914] Several cell-based in vitro assays were performed with primary human PBMCs to evaluate the activity of CD28(SA) and bispecific FAP-targeted CD28 antigen binding molecules in the presence and absence of TCR signals provided by T-cell bispecific-(TCB) antibodies. T-cell proliferation, cytokine secretion, and tumor cell killing as determined by flow cytometry, cytokine ELISA, and live cell imaging were obtained as read-outs.

[0915] 1. The activity of the original superagonistic CD28(SA) IgG4 was assessed using a previously described high density pre-culture system to restore the responsiveness of peripheral blood derived T cells towards CD28-mediated superagonism (Römer et al., 2011).

[0916] 2. The functionality of targeted CD28 molecules in absence of TCR signals was assessed in a primary human PBMC co-culture assay, wherein FAP- or CEA-targeted CD28 molecules were crosslinked by simultaneous binding to human CD28 on T cells and human FAP, expressed on either 3T3-huFAP cells (parental cell line ATCC # CCL-92, modified to stably overexpress human FAP) or MCSP- and FAP-expressing MV3 melanoma cells, or CEA-expressing MKN45 gastric cancer cells, respectively.

[0917] 3. The functionality of FAP-targeted CD28 molecules in presence of TCR signals was assessed as described above, with the additional presence of a TCB molecule, crosslinked by simultaneous binding to CD3 on T cells and, either human CEA on MKN45 gastric cancer cells, Lovo colon cancer cells, HT-29 colon cancer cells, or MCSP, expressed on MV3 melanoma cells.

[0918] PBMC Isolation

[0919] Peripheral blood mononuclear cells (PBMCs) were prepared by density gradient centrifugation from enriched lymphocyte preparations of heparinized blood obtained from a Buffy Coat (Blutspende Zürich). 25 ml of blood (diluted 1:2 in PBS) were layered over 15 ml lymphoprep (STEMCELL technologies, Cat No 07851) and centrifuged at room temperature for 25 min at 845×g without brake. The PBMC-containing interphase was collected in 50 ml tubes with a 10 ml pipette. The cells were washed with PBS and centrifuged 5 min at 611×g. The supernatant was discarded, the pellet re-suspended in 50 ml PBS and centrifuged for 5 min at 304×g. The washing step was repeated, centrifuging at 171×g. The cells were re-suspended in RPMI 1640 Glutamax (containing 5% human serum, sodium pyruvate, NEAA, 50 μM 2-mercaptoethanol, Penicillin/Streptomycin) and processed for further functional analysis according to the respective assay protocol.

[0920] High Density Pre-Culture of PBMCs and In Vitro Assessment of T Cell Activation by the CD28 Superagonist CD28(SA)

[0921] To restore the responsiveness of human T cells to TGN1412-mediated CD28 superagonism, PBMCs were pre-cultured at high density (HD) (Römer et al, 2011) before assessing the effects of CD28 superagonistic antibodies. In brief, PBMCs were adjusted to 1E7 cells/ml in complete medium (RPMI 1640 Glutamax, 5% human serum, Sodium-Pyruvate, NEAA, 50 uM 2-Mercaptoethanol, Penicillin/Streptomycin) and cultured at 1.5 ml/well in a 24-well plate for 48 hours at 37° C., 5% CO₂. Cells were then re-harvested, washed in complete medium, centrifuged at 550×g for 5 min and adjusted with to the desired cell density required for functional characterization. To assess T cell proliferation, PBMCs were labelled with CFSE and CFSE-dilution was measured as proxy for T cell proliferation after 5 days of stimulation. In brief, cells were adjusted to 2×10⁷/ml in PBS and labelled with 2.5 μM CFSE proliferation dye (LifeTechnologies, Cat No 65-0850-84) for 6 minutes at 37° C., 5% CO₂. Cells were washed once in complete medium, followed by 2 washing steps in PBS. For stimulation with TGN1412, PBMCs were adjusted to 2×10⁶/ml in complete medium and 1×10⁵ cells were distributed to each well of a flat bottom 96-well plate and stimulated with increasing concentrations of TGN1412 (0.0002 nM to 10 nM, triplicates). CFSE-dilution was assessed by flow cytometry. Briefly, cells were centrifuged at 550×g for 5 min and washed with PBS. CFSE-dilution was assessed by flow cytometry. Briefly, cells were centrifuged at 550×g for 5 min and washed with PBS. Surface staining for CD8 (BV711 anti-human CD8a, BioLegend #301044), CD4 (PE-Cy7 anti-human CD4, BioLegend #344612) was performed according to the suppliers' indications. Cells were then washed twice with 150 μl/well PBS and resuspended in 200 μl/well FACS buffer and analyzed using BD FACS Fortessa. Cytokine secretion was measured at day 5 post activation via cytokine ELISA (huTNFα, DuoSet # DY210-05 and huIFNγ, DuoSet # DY285-05) or cytokine multiplex (Human Cytokine 17-plex assay, Bio-Rad # M5000031YV) analysis from culture supernatants.

[0922] In Vitro Assessment of T Cell Proliferation and Cytokine Secretion by Bispecific FAP-Targeted CD28 Antigen Binding Molecules in Absence and Presence of TCB Signals

[0923] Pan T cells were used as effector cells and isolated from PBMCs by MACS, using the Pan T Cell Isolation Kit (Miltenyi Biotec) according to the manufacturer's instructions.

[0924] To measure T cell activation by bispecific FAP-CD28 antigen binding molecules in absence of TCB, CFSE-labelled pan T cells were co-cultured with 3×10⁴/well 3T3-huFAP or parental 3T3 cells lacking FAP expression (3T3-WT), seeded the previous day in flat-bottom 96-well plates. Bispecific FAP-CD28 antigen binding molecules were added in increasing concentrations (0.0002 nM-10 nM, triplicates).

[0925] To measure T cell proliferation in presence of a TCB signal, CFSE-labelled pan T cells were incubated with 3×10⁴ FAP- and MCSP-expressing MV3 cells/well, seeded the previous day in flat-bottom 96-well plates, increasing concentrations of bispecific FAP-CD28 antigen binding molecules (0.0002 nM-10 nM, triplicates), and fixed concentration of MCSP-TCB (5 pM, P1AD2189). As controls, wells containing only TCB were included.

[0926] CFSE-dilution was assessed by flow cytometry and cytokine secretion was measured at 5 days post activation via cytokine ELISA (huTNFα, DuoSet # DY210-05 and huIFNγ, DuoSet # DY285-05) or cytokine multiplex (Human Cytokine 17-plex assay, Bio-Rad # M5000031YV) analysis from culture supernatants.

[0927] The preparation of the anti-MCSP/anti-CD3 bispecific antibody (MCSP-TCB) used in the experiment is described in WO 2014/131712 A1.

[0928] Superagonism of CD28(SA) Requires FcγRIIb Cross-Linking

[0929] High Density Pre-Culture of PBMCs Restores CD28(SA) Superagonism

[0930] To understand the mechanism of action of CD28(SA), we validated high density (HD) pre-culture of PBMCs as a previously described protocol to restore the ability of PBMC-derived T cells to respond to TGN1412-mediated CD28 superagonism (Römer et al., 2011). As depicted in FIGS. 5A and 5B, CD28(SA) IgG4 (P1AE1975) induces PBMC T cell proliferation (FIG. 5A) and cytokine production (FIG. 5B) in a concentration-dependent manner at 5 days post stimulation only in PBMCs subjected to HD pre-culture, while fresh PBMCs remained unresponsive. We concluded that the previously published protocol to restore T cells' responsiveness to CD28(SA) in vitro (Römer et al., 2011) could be reproduced in our hands.

[0931] CD28(SA) Superagonistic Activity Requires Cross-Linking Via FcγRIIb—Blocking of FcγRIIb Abolishes CD28(SA) Functionality

[0932] Previously published literature indicates that TGN1412 potentially relies on FcγRIIb cross-linking. To understand the link between HD pre-culture of PBMCs and Fc-dependence of CD28(SA) functionality, the expression levels of FcγRIIb on PBMCs were assessed by flow cytometry before and after HD pre-culture. As depicted in FIG. 5C, FcγRIIb expression was absent in fresh PBMC monocytes, while 96.8% of monocytes expressed FcγRIIb after 2 days of HD pre-culture. Antibody-mediated blocking of FcγRIIb in subsequent T cell proliferation assays completely abrogated T cell proliferation upon stimulation with CD28(SA), measured after 5 days in culture (FIG. 5D). In an alternative approach, an Fc-silenced variant of CD28(SA) which carries the P329G-LALA mutation (CD28(SA) IgG1 PG-LALA: P1AD9289) did not display superagonistic function (FIG. 6A). These data confirm that CD28(SA)-mediated CD28 superagonism relies on cross-linking via FcγRIIb.

[0933] Adding a Tumor-Targeting Moiety for FAP-Targeting to Fc-Silent CD28(SA) Restores Superagonism, which is then Dependent on the Presence of the Tumor Target

[0934] Given that CD28 superagonism by TGN1412 relies on FcγRIIb cross-linking, we hypothesized that FcR-dependence may be re-directed to tumors by introduction of (i) an Fc-silencing P329G-LALA mutation and (ii) a targeting moiety that cross-links to a surface-expressed tumor-antigen. To test this hypothesis, a FAP-targeting moiety was added as C-terminal fusion to an Fc-silenced TGN1412 (FAP-CD28 1+2 SA: P1AD9011). Since FcR-crosslinking was not required for this approach, PBMCs were not subjected to HD pre-culture. Instead, fresh PBMCs were co-cultured with 3T3-huFAP or 3T3-WT for 5 days in presence of increasing concentration of FAP-CD28 (P1AD9011) and T cell proliferation was assessed by CFSE-dilution via flow cytometry. As shown in FIG. 6B, the introduction of FAP-binding moiety enabled T cell proliferation exclusively in the presence of FAP. We concluded that superagonism can be selectively targeted to tumor antigens by Fc-silencing and addition of a tumor-targeting moiety.

[0935] Conventional CD28 Agonistic Antibodies (Clone 9.3) do not Behave Superagonistically in Tumor-Targeted Bispecific Formats

[0936] Two types of CD28 agonistic antibodies have been reported in the literature: superagonistic CD28 antibodies such as TGN1412 are able to autonomously activate T cells without the necessity of an additional signal provided by TCR. These antibodies are referred to as superagonists, because they surpass the functionality of natural CD28 agonistic ligands CD80 and CD86, which strictly rely on the presence of a TCR signal to enhance T cell function. In contrast to superagonistic antibodies such as TGN1412, conventional agonistic antibodies such as clone mab 9.3 are not able to activate T cells autonomously, but, just like the natural CD28 ligands, require an additional TCR signal to enhance T cell activity. To assess the effect of targeting CD28 agonists to tumor antigens in more detail, we generated further FAP-CD28 molecules: (i) a superagonistic (SA) molecule with 2 CD28 binding moieties (TGN1412) and 2 FAP binding moieties=2+2 SA format (PIAD4493), (ii) a conventional agonist (CA) with 2 CD28 binding moieties (clone 9.3) and 1 or 2 FAP binding moieties, respectively: 2+2 CA (PIAD8968), 1+2 CA (PIAD8962). Fresh PBMCs were co-cultured with 3T3-huFAP or 3T3-WT for 5 days in presence of increasing concentration of the FAP-targeted molecules and T cell proliferation was assessed by CFSE-dilution via flow cytometry. As depicted in FIGS. 7A to 7D, only superagonistic binders were able to activate T cells. Further, T cell activation via the described superagonistic constructs is strictly dependent on the presence of FAP (FIG. 7B), as demonstrated by absent T cell activation in absence of FAP (FIG. 7D). In line with these data, also cytokine secretion was only observed for constructs harboring the superagonistic CD28(SA) antibodies, but not the conventional agonistic 9.3 antibody (FIG. 7E). We concluded that only superagonistic CD28 antibodies elicit autonomous T cell activation in bispecific tumor-targeted antibody formats, while the same formats with conventional 9.3 binders are not superagonistic.

### Example 7

### In Vitro Assessment of Tumor Cell Killing by Tumor-Targeted CD28 Molecules in the Absence or Presence of TCB

[0937] To assess the ability of bispecific FAP-CD28 or CEA-CD28 antigen binding molecules to achieve tumor cell killing or support TCB-mediated tumor cell killing, purified pan T cells served as effector cells and RFP-expressing MV3 cells and MKN45 cells, respectively, served as tumor targets.

[0938] To assess killing of MV3 tumor cells, 5000 MV3 target cells seeded the previous day were co-cultured with 1×10⁵ pan T cells per well in flat bottom 96-well plates (E:T 20:1), in presence of 5 pM MCSP-TCB (P1AD2189) alone or in combination with 10 nM bispecific FAP-CD28 antigen binding molecule. To assess killing of MV3 tumor cells, 5000 MV3 target cells seeded the previous day were co-cultured with 1×10⁵ pan T cells per well in flat bottom 96-well plates (E:T 20:1), in presence of 2 nM FAP-CD28. To assess the killing of MKN45 tumor cells, 5000 MKN45, seeded the previous day, were co-cultured with 1×10⁵ pan T cells per well in flat-bottom 96-well plates in presence of 2 nM CEA-CD28. Killing of target cells was monitored over the course of 90 hours, using the IncuCyte live cell imaging system (Essen Biosciences), capturing 4 images per well every 3 hours. RFP+ object counts per image (assessed via IncuCyte ZOOM software, Essen Biosciences) over time served as proxy for target cell death. Antibody-mediated target cell killing was distinguished from spontaneous target cell death by monitoring counts of target cells in presence of effector T cells alone over time (=baseline control). Killing was calculated as 100−x, x being % targets relative to the baseline control. Statistical analyses were performed using student's t-test, comparing the areas under the curves (AUC) of % killing over time.

[0939] FAP-CD28 Induces Target Cell Killing in the 1+2 Format, but Only with Superagonistic CD28 Binders, not with Conventional CD28 Agonistic Binders

[0940] The ability of FAP-CD28 molecules to induce tumor cell killing was assessed. As depicted in FIGS. 8A to 8D, co-culture of PBMC-derived T cells with FAP-expressing MV3 melanoma cells in presence of FAP-CD28 over 90 hours led to killing of MV3 cells exclusively by FAP CD28(SA) in 1+2 format (P1AD9011) and was comparable to the induction of killing achieved by a FAP-targeted TCB (7). No killing was observed with FAP-CD28(SA) in 2+2 format (P1AD4493) as well as FAP-CD28 with conventional CD28 agonistic 9.3 antibody (P1AD8968 & P1AD8962). We conclude that in addition to T cell proliferation and cytokine secretion, a FAP-CD28 in 1+2 format with superagonistic binders can also elicit target cell killing, comparable to a TCB.

[0941] CEA-CD28 Induces Target Cell Killing in the 1+2 and 2+2 Format, but Only with Superagonistic Antibodies, not with Conventional CD28 Agonistic Antibodies

[0942] In an alternative approach, we used CEA-targeted CD28 agonistic molecules in the 2+2 SA (P1AE1195), 1+2 SA (P1AE1194), 2+2 CA (P1AE1193), and 2+1 CA (P1AE1192) formats to assess their ability to induce target cell killing. PBMC T cells were co-cultured with CEA-expressing MKN45 cells in presence of CEA-CD28 in the aforementioned formats for 90h. Both formats containing superagonistic CD28 binders were able to induce killing of CEA-expressing MKN45 cells (FIGS. 9A and 9B). We speculate that the discrepancy between FAP-CD28(SA) 2+2 and CEA-CD28 (SA) 2+2's ability to kill their respective target cells lies within discrepancies of target expression levels in MKN45 vs. MV3 cells. Precisely, in house data confirmed that FAP-expression levels of MV3 cells are 10× lower than CEA-expression levels of MKN45 cells. Thus, in MV3 cells, tumor target binding sites might be limiting and killing of MV3 cells requires efficient occupancy of FAP vs. CD28, which is advantageous in the 1+2 format (i.e. 1 FAP binding site cross-links 2 CD28 binding sites) compared to the 2+2 (i.e. 2 FAP binding sites required for cross-linking of 2 CD28 binding sites).

[0943] CD28 Superagonism by TGN1412 Binders Relies on CD28 Binder Multivalency—Monovalent Binders are not Superagonistic

[0944] To further investigate the nature of CD28 superagonism, we assessed if monovalent CD28 TGN1412 binders display superagonistic behavior in a tumor-targeted bispecific format. PBMC T cells were co-cultured with 3T3-huFAP cells and incubated with increasing concentrations FAP-CD28 1+2 SA with CD28 bivalency (P1AD9011) and FAP-CD28 1+1 SA with CD28 monovalency (P1AD4492). As displayed in FIG. 10A, FAP-CD28 with monovalent CD28 binding (P1AD4492) was not able to induce T cell proliferation, as opposed to the CD28 bivalent construct (P1AD9011). Consistently, upregulation of the T cell activation markers CD69 and CD25 was only observed with the CD28 bivalency (FIGS. 10B and 10C, respectively). In conclusion, TGN1412-mediated superagonism does not only rely on cross-linking via Fc receptors but also requires CD28 binder multivalency.

[0945] In conclusion, it could be established that CD28 superagonism can be targeted specifically to tumor antigens by Fc-silencing and introduction of an antigen binding domain capable of specific binding to a tumor-associated antigen. Further, tumor-targeted bispecific antibodies are only superagonistic when they comprised CD28(SA)-based binders and not when they comprised conventional agonistic binders (clone 9.3). Further, superagonism requires multivalency of the CD28(SA) binder and monovalent CD28(SA) binding in bispecific constructs abrogates superagonistic T cell activation.

[0946] FAP-CD28 Supports TCB-Mediated Target Cell Killing and Requires CD28 Binder Monovalency to Sustain Tumor Target Dependence

[0947] CD28 signaling is well described to enhance T cell receptor mediated T cell responses. Therefore, T cell bispecific antibodies (TCBs) are a promising combination partner for CD28 agonism. Through combination of targeted CD28 agonism with TCBs, we envision to enhance TCB-mediated effector functions, lower the threshold of CEA-expression for efficient TCB-mediated T cell activation, provide survival cues and support resistance towards T cell suppression via PD-1 and CTLA4.

[0948] To investigate if targeted CD28 agonists can enhance TCBs, we assessed the ability of FAP-CD28(SA) 1+2 (P1AD9011) and FAP-CD28(SA) 1+1 (P1AD4492) to support TCB-mediated target cell killing. Co-culture of PBMC-derived T cells with MCSP- and FAP co-expressing MV3 cells for 5 days in the presence of increasing concentrations of FAP-CD28 and fixed, limiting concentration of MCSP-TCB (5 pM) led to increased killing of MV3 target cells in a FAP-CD28 concentration-dependent manner (FIG. 11A). However, the presence of the TCB abolished FAP-dependence of FAP-CD28 in the CD28 bivalent format (P1AD9011), while FAP-dependence was maintained in the CD8 monovalent format (P1AD4492), as demonstrated by a concentration-dependent increase in CEACAM5-TCB-mediated target cell killing in presence of CEA-expressing, FAP-negative MKN45 tumor cells at 5 days post stimulation (FIG. 11B).

[0949] In an alternative approach, we assessed T cell proliferation induced by FAP-CD28 1+2 SA (P1AD9011) in presence or absence of TCB and in presence or absence of FAP, respectively. As shown in FIG. 12A and in the previous example, FAP-CD28(SA) 2+1 is strictly dependent on the presence of FAP for T cell activation in absence of TCBs. In presence of TCBs, however, as shown in FIG. 12B, FAP-CD28(SA) 1+2 induces enhancement of T cell activation even in absence of FAP.

[0950] We hypothesize that the TCB-induced TCR signal potentially leads to sufficient pre-clustering of TCR signaling components, thus rendering surface cross-linking of CD28 receptors on T cells by bivalent CD28 molecules sufficient to elicit co-stimulation. We conclude that for TCB combination approaches, CD28 binder monovalency is strictly required to maintain tumor-target dependence of the targeted CD28 agonistic antigen binding molecule.

[0951] Comparison of Various Monovalent FAP-CD28 Formats Reveals a Set of Various Functional FAP-CD28 Formats, with Highest Potency for Classical 1+1 Format

[0952] To assess the impact of the specific antibody format of FAP-CD28 on its ability to enhance TCB-mediated T cell activation, different formats of FAP-CD28 antigen binding molecules with monovalent CD28 binding were generated and are depicted in FIGS. 1C, 1K, 1L and 1M. FAP-CD28 1+2 with CD28 bivalency was used as a reference. To assess the functionality of these formats, PBMC T cells were incubated with with MCSP- and FAP co-expressing MV3 cells for 5 days in the presence of increasing concentrations of FAP-CD28 formats together with fixed, limiting concentration of MCSP-TCB (5 pM). All formats were able to significantly increase CD8 T cell proliferation (FIG. 13A), CD4 T cell proliferation (FIG. 13B), and Target cell killing (FIG. 13C). Of note, the potency of the molecule C (P1AD4492) was highest, and comparable to the potency of the bivalent CD28 reference format 1+2 SA (P1AD9011). Binding to CD28 and FAP of all molecules is shown in FIGS. 2F and 2G, respectively.

### Example 8

### In Vitro Assessment of Tumor Cell Killing of the Combination of Tumor-Targeted CD28 Molecules and CEA-Targeted TCBs

[0953] Preparation of T-Cell Bispecific (TCB) Antibodies

[0954] TCB molecules have been prepared according to the methods described in WO 2014/131712 A1 or WO 2016/079076 A1. The preparation of the anti-CEA/anti-CD3 bispecific antibody (CEA CD3 TCB or CEA TCB) used in the experiments is described in Example 3 of WO 2014/131712 A1. CEA CD3 TCB is a “2+1 IgG CrossFab” antibody and is comprised of two different heavy chains and two different light chains. Point mutations in the CH3 domain (“knobs into holes”) were introduced to promote the assembly of the two different heavy chains. Exchange of the VH and VL domains in the CD3 binding Fab were made in order to promote the correct assembly of the two different light chains. 2+1 means that the molecule has two antigen binding domains specific for CEA and one antigen binding domain specific for CD3. CEACAM5 CD3 TCB has the same format, but comprises another CEA binder and comprises point mutations in the CH and CL domains of the CD3 binder in order to support correct pairing of the light chains. CEA CD3 TCB comprises the amino acid sequences of SEQ ID NO: 161, SEQ ID NO:162, SEQ ID NO:163 and SEQ ID NO:164. CEACAM5 CD TCB comprises the amino acid sequences of SEQ ID NO:165, SEQ ID NO:166, SEQ ID NO:167 and SEQ ID NO:168.

[0955] CEA-CD28 Synergizes with CEACAM5-TCB in Target Cell Killing

[0956] In an alternative approach, we generated a CEA-CD28(SA) 1+1 bispecific antigen binding molecule (Molecule M, P1AE3127) and assessed its ability to enhance CEACAM5-TCB mediated target cell killing. To this end, CEA-expressing MKN45 colorectal cancer cells were co-cultured with PBMC T cells and CEA-CD28 (Molecule M, P1AE3127) or untargeted monovalent CD28 (Molecule L, P1AD8944) in presence or absence of suboptimal CEACAM5-TCB (10 nM) and MKN45 cell killing was assessed over time. As shown in FIG. 14, only the combination of CEACAM5-TCB and CEA-CD28 led to target cell killing, while the compounds alone did not achieve target cell killing, indicating synergistic effects. Further, untargeted CD28 in combination with CEACAM5-TCB also did not induce killing, highlighting once more the requirement of monovalent CD28 agonists for cross-linking and the thereby sustained dependence on the tumor target.

[0957] CEA-CD28 Enhances CEA-TCB and CEACAM5-TCB and Lowers CEA-Expression Thresholds on Cancer Cells for TCBs to Activate T Cells

[0958] CEA-TCB and CEACAM5-TCB require a certain expression level of CEA on target cells to T cell activation and target cell killing. We assessed whether CEA-CD28 was able to lower the CEA-expression threshold for TCBs to induce efficient target cell killing. To this end, PBMC T cells were incubated with increasing concentrations of either CEA-TCB (P1AD4646) or CEACAM5-TCB (P1AD5299) and fixed concentrations of CEA-CD28 (Molecule M, P1AE3127) in presence of target cell lines with different CEA expression levels: (i) MKN45 (high expression, approx. 400 000 CEA binding sites/cell), (ii) Lovo (medium expression, approx. 60 000 CEA binding sites/cell), (iii) HT-29 (low expression, approx. 6 000 CEA binding sites/cell). T cell proliferation was measured as proxy of T cell activation. As shown in FIG. 15, CEA-CD28 could significantly increase the potency of CEA-TCB and CEACAM5-TCB. Most strikingly, while the TCBs did not achieve T cell activation on low CEA-expressing HT-29 cells alone, addition of CEA-CD28 strongly enhanced the activity of the TCB. We conclude that CEA-CD2 enhances CEA-TCB and CEACAM5-TCB and lowers CEA-expression thresholds on cancer cells for TCBs to activate T cells.

### Example 9

### In Vitro Functional Characterization of Affinity-Reduced Variants of CD28(SA)

[0959] For the original CD28(SA) binder (TGN1412) an affinity of K_{D}=1 nM was determined. High affinity binders like this harbor the risk to be subject to peripheral sink effects, especially if the target is highly expressed in peripheral blood, as is the case for CD28. In order to (i) reduce peripheral sink effects, and (ii) reduce the risk of peripheral T cell activation through off-tumor binding of bispecific tumor-targeted CD28 antibodies to T cells, we generated a series of 31 CD28 binders with reduced affinities by introducing point mutations in the CDRs (see Example 3). FIGS. 4A, 4B and 4C show binding to CD28 on CHO cells of the CD28 monospecific, monovalent IgGs from supernatants, confirming that addition of point mutations generated a broad range of binders with varying binding properties. Based on these data, a shortlist of 11 candidates was selected for conversion into the FAP-CD28 bispecific format (see Example 4, Table 6) for further characterization. Binding assays confirmed positive binding to FAP on cells (FIGS. 4F and 4G) as well as positive and varying binding to CD28 of the chosen variants (FIGS. 4D and 4E).

[0960] Affinity-Reduced CD28 Binder Variants are Functional In Vitro in a FAP-CD28 Bispecific Format

[0961] To assess whether affinity-reduced CD28 binder variants were still functional and able to support TCB-mediated effector functions, we assessed T cell proliferation in TCB combination. To this end, PBMC T cells were co-cultured with MCSP- and FAP co-expressing MV3 cells for 5 days in the presence of increasing concentrations of FAP-CD28 and fixed, limiting concentration of MCSP-TCB (5 pM). As depicted in FIG. 4H, all variants of the CD28 binders were functional and able to increase TCB-mediated T cell proliferation in a concentration dependent manner. Of note, the lowest affinity variant 8 (P1AE3131) shows an approximate 20fold reduction of affinity compared to the parental CD28 clone but recovers approximately 86% of its potency (FIG. 4I). In line with these findings, all variants could further enhance the TCB-mediated killing of MV3 target cells (FIG. 4J). The corresponding EC₅₀ values are shown in Table 8 below.

TABLE 8
TCB-mediated killing of MV3 target cells by FAP-
CD28 bispecific molecules of MV3 target cells

| FAP-CD28 | | EC₅₀ killing |
|---|---|---|
| variant | TAPIR | (nM) |
| parental | P1AD4492 | 0.98 |
| variant 8 | P1AE3131 | 2.33 |
| variant 11 | P1AE3132 | 1.73 |
| variant 12 | P1AE3133 | 0.98 |
| variant 15 | P1AE3134 | 1.79 |
| variant 29 | P1AE3141 | 1.11 |

[0962] Based on these results, variants 8 (lowest affinity, 23 nM), 15 (intermediate affinity: 7.1 nM) and 29 (removed hot-spots, nearly no affinity reduction, K_{D}=1.1 nM) were chosen for further characterization in vitro and testing in vivo, judged by efficacy and improved bio-distribution to the tumor.

[0963] Affinity Reduced CD28 Binder Variants are Functional In Vitro in a CEA-CD28 Bispecific Format

[0964] In an alternative approach, we converted the three selected variants 8, 15 and 29 into a CEA-targeted bispecific format and assessed their ability to enhance CEACAM5-TCB mediated T cell activation and target cell killing. The binding to CD28 of these molecules is shown in FIG. 16. To assess functionality, PBMC T cells were incubated with increasing concentrations of CEACAM5-TCB and fixed concentrations of CEA-CD28 variants in presence of CEA-expressing MKN45 target cells. As depicted in FIGS. 17A, 17B and 17C, all variants were able to enhance TCB-mediated CD8 T cell proliferation after 5 days (FIG. 17A), CD4 T cell proliferation after 5 days (FIG. 17B), and target cell killing at 90 h (FIG. 17C). The corresponding EC₅₀ values are summarized in Table 9 below.

TABLE 9
EC₅₀ values of TCB-mediated CD8 and CD4 T cell proliferation
and target cell killing by CEA-CD28 bispecific variants

| | CD4 | CD8 | |
|---|---|---|---|
| CEA-CD28 | proliferation | proliferation | Killing |
| antibody | EC₅₀ [nM] | EC₅₀ [nM] | EC₅₀ [nM] |
| Parental CD28 | 0.0013 | 0.0015 | 0.002 |
| Variant 8 | 0.0035 | 0.0033 | 0.004 |
| Variant 15 | 0.0021 | 0.0016 | 0.005 |
| Variant 29 | 0.0013 | 0.0013 | 0.004 |
| TCB alone | 0.046 | 0.038 | 0.012 |

### Example 10

### Generation and Production of New Anti-CEA Antibodies

### 10.1 Generation of Humanized Variants of Anti-CEA Antibody A5B7

### 10.1.1 Methodology

[0965] Anti-CEA antibody A5B7 is for example disclosed by M. J. Banfield et al, Proteins 1997, 29(2), 161-171 and its structure can be found as PDB ID: 1CLO in the Protein structural database PDB (www.rcsb.org, H. M. Berman et al, The Protein Data Bank, Nucleic Acids Research, 2000, 28, 235-242). This entry includes the heavy and the light chain variable domain sequence. For the identification of a suitable human acceptor framework during the humanization of the anti-CEA binder A5B7, a classical approach was taken by searching for an acceptor framework with high sequence homology, grafting of the CDRs on this framework, and evaluating which backmutations can be envisaged. More explicitly, each amino acid difference of the identified frameworks to the parental antibody was judged for impact on the structural integrity of the binder, and back mutations towards the parental sequence were introduced whenever appropriate. The structural assessment was based on Fv region homology models of both the parental antibody and its humanized versions created with an in-house antibody structure homology modeling tool implemented using the Biovia Discovery Studio Environment, version 4.5.

### 10.1.2 Choice of Acceptor Framework and Adaptations Thereof

[0966] The acceptor framework was chosen as described in Table 10 below:

TABLE 10
Acceptor framework

| | | Choice of human |
|---|---|---|
| | Closest murine | acceptor V-region |
| | V-region germline | germline |
| A5B7 VH | mu-IGHV7-3-02 | IGHV3-23-01 or |
| | | IGHV3-15-01 |
| A5B7 VL | mu-IGKV4-72-01 | IGKV3-11-01 |

[0967] Post-CDR3 framework regions were adapted from human J-element germline IGJH6 for the heavy chain, and a sequence similar to the kappa J-element IGKJ2, for the light chain.

[0968] Based on structural considerations, back mutations from the human acceptor framework to the amino acid in the parental binder were introduced at positions 93 and 94 of the heavy chain.

### 10.1.3 VH and VL Regions of the Resulting Humanized CEA Antibodies

[0969] The resulting VH domains of humanized CEA antibodies can be found in Table 11 below and the resulting VL domains of humanized CEA antibodies are listed in Table 12 below.

TABLE 11
Amino acid sequences of the VH domains of humanized CEA antibodies, based
on human acceptor framework IGHV3-23 or IGHV3-15

| | | SeqID |
|---|---|---|
| Description | Sequence | NO |
| A5B7 VH | EVKLVESGGGLVQPGGSLRLSCATSGFTFTDYYMNWVRQPPGKALEWLGF | 178 |
| murine donor | IGNKANGYTTEYSASVKGRFTISRDKSQSILYLQMNTLRAEDSATYYCTR | |
| sequence | DRGLRFYFDYWGQGTTLTVSS | |
| IGHV3-23-02 | EVQLLESGGGLVQPGGSLRLSCAASGFTFSSYAMSWVRQAPGKGLEWVSA | 218 |
| human | ISGSGGSTYYGDSVKGRFTISRDNSKNTLYLQMNSLRAEDTAVYYCAK | |
| acceptor | | |
| sequence | | |
| Humanized | | |
| variants | | |
| 3-23A5-1 | EVQLLESGGGLVQPGGSLRLSCAASGFTFTDYYMNWVRQAPGKGLEWVGF | 220 |
| | IGNKANGYTTEYSASVKGRFTISRDNSKNTLYLQMNSLRAEDTAVYYCAR | |
| | DRGLRFYFDYWGQGTTVTVSS | |
| 3-23A5-2 | EVQLLESGGGLVQPGGSLRLSCAASGFTFTDYYMNWVRQAPGKGLEWVGF | 221 |
| | IGNKANGYTTYYGDSVKGRFTISRDNSKNTLYLQMNSLRAEDTAVYYCAR | |
| | DRGLRFYFDYWGQGTTVTVSS | |
| 3-23A5-3 | EVQLLESGGGLVQPGGSLRLSCAASGFTFTDYYMNWVRQAPGKGLEWVGF | 222 |
| | IGNKGYTTEYSASVKGRFTISRDNSKNTLYLQMNSLRAEDTAVYYCARDR | |
| | GLRFYFDYWGQGTTVTVSS | |
| 3-23A5-4 | EVQLLESGGGLVQPGGSLRLSCAASGFTFTDYYMSWVRQAPGKGLEWVGF | 223 |
| | IGNKANGYTTEYSASVKGRFTISRDNSKNTLYLQMNSLRAEDTAVYYCAR | |
| | DRGLRFYFDYWGQGTTVTVSS | |
| 3-23A5-1A | EVQLLESGGGLVQPGGSLRLSCAASGFTFTDYYMNWVRQAPGKGLEWLGF | 224 |
| (all_ | IGNKANGYTTEYSASVKGRFTISRDKSKNTLYLQMNSLRAEDTATYYCTR | |
| backmutations) | DRGLRFYFDYWGQGTTVTVSS | |
| 3-23A5-1C | EVQLLESGGGLVQPGGSLRLSCAASGFTFTDYYMNWVRQAPGKGLEWVGF | 225 |
| (A93T) | IGNKANGYTTEYSASVKGRFTISRDNSKNTLYLQMNSLRAEDTAVYYCTR | |
| | DRGLRFYFDYWGQGTTVTVSS | |
| 3-23A5-1D | EVQLLESGGGLVQPGGSLRLSCAASGFTFTDYYMNWVRQAPGKGLEWVGF | 226 |
| (K73) | IGNKANGYTTEYSASVKGRFTISRDKSKNTLYLQMNSLRAEDTAVYYCAR | |
| | DRGLRFYFDYWGQGTTVTVSS | |
| 3-23A5-1E | EVQLLESGGGLVQPGGSLRLSCAASGFTFTDYYMNWVRQAPGKGLEWLGF | 186 |
| (G54A) | IGNKANAYTTEYSASVKGRFTISRDKSKNTLYLQMNSLRAEDTATYYCTR | |
| | DRGLRFYFDYWGQGTTVTVSS | |
| IGHV3-15*01 | EVQLVESGGGLVKPGGSLRLSCAASGFTFSNAWMSWVRQAPGKGLEWVGR | 219 |
| human | IKSKTDGGTTDYAAPVKGRFTISRDDSKNTLYLQMNSLKTEDTAVYYCTT | |
| acceptor | | |
| sequence | | |
| Humanized | | |
| variants | | |
| 3-15A5-1 | EVQLVESGGGLVKPGGSLRLSCAASGFTFTDYYMNWVRQAPGKGLEWVGF | 227 |
| | IGNKANGYTTEYSASVKGRFTISRDDSKNTLYLQMNSLKTEDTAVYYCTR | |
| | DRGLRFYFDYWGQGTTVTVSS | |
| 3-15A5-2 | EVQLVESGGGLVKPGGSLRLSCAASGFTFTDYYMNWVRQAPGKGLEWVGF | 228 |
| | IGNKANGYTTEYAAPVKGRFTISRDDSKNTLYLQMNSLKTEDTAVYYCTR | |
| | DRGLRFYFDYWGQGTTVTVSS | |
| 3-15A5-3 | EVQLVESGGGLVKPGGSLRLSCAASGFTFTDYYMNWVRQAPGKGLEWVGF | 229 |
| | IGNKANGGTTDYAAPVKGRFTISRDDSKNTLYLQMNSLKTEDTAVYYCTR | |
| | DRGLRFYFDYWGQGTTVTVSS | |

[0970] For the heavy chain, the initial variant 3-23A5-1 was found suitable in binding assays (but showed slightly less binding than the parental murine antibody) and was chosen as starting point for further modifications. The variants based on IGHV3-15 showed less binding activity compared to humanized variant 3-23A5-1.

[0971] In order to restore the full binding activity of the parental chimeric antibody, variants 3-23A5-1A, 3-23A5-1C and 3-23A5-1D were created. It was also tested for variant 3-23A5-1 whether the length of CDR-H2 could be adapted to the human acceptor sequence, but this construct completely lost binding activity. Since a putative deamidation hotspot was present in CDR-H2 (Asn53-Gly54), we changed that motif to Asn53-Ala54. Another possible hotspot Asn73-Ser74 was backmutated to Lys73-Ser74. Thus, variant 3-23A5-1E was created.

TABLE 12
Amino acid sequences of the VLdomains of humanized CEA antibodies, based
on human acceptor framework IGKV3-1 1.

| | | SeqID |
|---|---|---|
| Description | Sequence | NO |
| A5B7 VL | QTVLSQSPAILSASPGEKVTMTCRASSSVTYIHWYQQKPGSSPKSWIYAT | 179 |
| murine | SNLASGVPARFSGSGSGTSYSLTISRVEAEDAATYYCQHWSSKPPTFGGG | |
| donor | TKLEIK | |
| sequence | | |
| IGKV3-11 | EIVLTQSPATLSLSPGERATLSCRASQSVSSYLAWYQQKPGQAPRLLIYD | 230 |
| human | ASNRATGIPARFSGSGSGTDFTLTISSLEPEDFAVYYCQQRSNWP | |
| acceptor | | |
| sequence | | |
| humanized | | |
| variants | | |
| A5-L1 | EIVLTQSPATLSLSPGERATLSCRASSSVTYIHWYQQKPGQAPRLLIYAT | 231 |
| | SNLASGIPARFSGSGSGTDFTLTISSLEPEDFAVYYCQHWSSKPPTFGQG | |
| | TKLEIK | |
| A5-L2 | EIVLTQSPATLSLSPGERATLSCRASQSVSSYIHWYQQKPGQAPRLLIYA | 232 |
| | TSNLASGIPARFSGSGSGTDFTLTISSLEPEDFAVYYCQHWSSKPPTFGQ | |
| | GTKLEIK | |
| A5-L3 | EIVLTQSPATLSLSPGERATLSCRASSSVTYIHWYQQKPGQAPRLLIYDA | 233 |
| | SNRATGIPARFSGSGSGTDFTLTISSLEPEDFAVYYCQHWSSKPPTFGQG | |
| | TKLEIK | |
| A5-L4 | EIVLTQSPATLSLSPGERATLSCRASSSVTYIHWYQQKPGQAPRLLIYAT | 234 |
| | SNLASGIPARFSGSGSGTDFTLTISSLEPEDFAVYYCQQWSSKPPTFGQG | |
| | TKLEIK | |
| A5-L1A | QTVLTQSPATLSLSPGERATLSCRASSSVTYIHWYQQKPGSSPKSWIYAT | 235 |
| (all_ | SNLASGIPARFSGSGSGTDYTLTISSLEPEDFAVYYCQHWSSKPPTFGQG | |
| backmutations) | TKLEIK | |
| A5-L1B | QTVLTQSPATLSLSPGERATLSCRASSSVTYIHWYQQKPGQAPRLLIYAT | 236 |
| (Q1T2) | SNLASGIPARFSGSGSGTDFTLTISSLEPEDFAVYYCQHWSSKPPTFGQG | |
| | TKLEIK | |
| A5-L1C | EIVLTQSPATLSLSPGERATLSCRASSSVTYIHWYQQKPGSSPKSWIYAT | 237 |
| (FR2) | SNLASGIPARFSGSGSGTDFTLTISSLEPEDFAVYYCQHWSSKPPTFGQG | |
| | TKLEIK | |
| A5-L1D | EIVLTQSPATLSLSPGERATLSCRASSSVTYIHWYQQKPGQAPRSWIYAT | 187 |
| (46, 47) | SNLASGIPARFSGSGSGTDFTLTISSLEPEDFAVYYCQHWSSKPPTFGQG | |
| | TKLEIK | |

[0972] The light chain was humanized based on the human IGKV3-11 acceptor framework. In the series A5-L1 to A5-L4, it was learned that variant A5-L1 shows good binding activity (but slightly less than the parental antibody). Partial humanization of CDR-L1 (variant A5-L2; Kabat positions 30 and 31) fully abrogates the binding. Likewise, humanization of CDR-H2 (variant A5-L3; Kabat positions 50 to 56) also fully abrogates the binding. The position 90 (variant A5-L4) shows significant contribution to the binding properties. The Histidine at this position is important for binding. Thus, variant A5-L1 was chosen for further modification.

[0973] The series A5-L1A to A5-L1D addressed the question which backmutations are required to restore the full binding potential of the parental chimeric antibody. Variant A5-L1A showed that backmutations at Kabat positions 1, 2, the entire framework 2, and Kabat position 71 do not add any further binding activity. Variants A5-L1B, and A5-L1C addressed subsets of those positions and confirm that they do not alter the binding properties. Variant A5-L1D with back mutations at Kabat positions 46 and 47 showed the best binding activity.

### 10.1.4 Selection of Humanized A5B7 Antibodies

[0974] Based on the new humanization variants of VH and VL new CEA antibodies were expressed as huIgG1 antibodies with an effector silent Fc (P329G; L234, L235A) to abrogate binding to Fcγ receptors according to the method described in WO 2012/130831 A1 and their binding to CEA expressed on MKN45 cells was tested and compared to the respective parental murine A5B7 antibody.

TABLE 13
VH/VL combinations expressed as huIgG1_LALA_PG antibodies

| | A5-L1A | A5-L1B | A5-L1C | A5-L1D |
|---|---|---|---|---|
| 3-23A5-1A | P1AE2164 | P1AE2165 | P1AE2166 | P1AE2167 |
| 3-23A5-1C | — | — | P1AE2176 | P1AE2177 |
| 3-23A5-1D | P1AE2179 | — | P1AE2181 | P1AE2182 |

[0975] MKN45 (DSMZ ACC 409) is a human gastric adenocarcinoma cell line expressing CEA. The cells were cultured in advanced RPMI+2% FCS+1% Glutamax. Viability of MKN-45 cells was checked and cells were re-suspended and adjusted to a density of 1 Mio cells/ml. 100 μl of this cell suspension (containing 0.1 Mio cells) were seeded into a 96 well round bottom plate. The plate was centrifuged for 4 min at 400×g and the supernatant was removed. Then 40 μl of the diluted antibodies or FACS buffer were added to the cells and incubated for 30 min at 4° C. After the incubation the cells were washed twice with 150 μl FACS buffer per well. Then 20 μl of the diluted secondary PE anti-human Fc specific secondary antibody (109-116-170, Jackson ImmunoResearch) was added to the cells. The cells were incubated for an additional 30 min at 4° C. To remove unbound antibody, the cells were washed again twice with 150 μl per well FACS buffer. To fix the cells 100 μl of FACS buffer containing 1% PFA were added to the wells. Before measuring the cells were re-suspended in 150 μl FACS buffer. The fluorescence was measured using a BD flow cytometer.

[0976] In FIG. 18 binding curves of the humanized A5B7 variants are shown. All tested binders were able to bind to MKN45 cells but binding capacity was slightly reduced compared to the parental A5B7 antibody. The clone P1AE2167 had the best binding of all tested variants and was selected for further development.

### 10.1.5 Determination of Affinities of Fab Fragments of Humanized Variants of Murine CEA-Antibody A5B7 to Human CEA Using Surface Plasmon Resonance (BIACORE)

[0977] The affinities of Fab fragments of the humanized variants of murine CEA antibody A5B7 to human CEA were assessed by surface plasmon resonance using a BIACORE T200 instrument. On a CM5 chip, human CEA (hu N(A2-B2)A-avi-His B) was immobilized at a 40 nM concentration by standard amine coupling on flow cell 2 for 30s to about 100RU. The Fab fragments of the humanized variants of murine CEA antibody A5B7 were subsequently injected as analytes in 3-fold dilutions ranging from 500-0.656 nM for a contact time of 120 s, a dissociation time of 250 or 1000 s and at a flow rate of 30 μl/min. Regeneration at the level of human CEA (hu N(A2-B2)A-avi-His B) was achieved by 2 pulses of 10 mM glycine/HCl pH2.0 for 60s. Data were double-referenced against the unimmobilized flow cell 1 and a zero concentration of the analyte. The sensorgrams of the analytes were fitted to a simple 1:1 Langmuir interaction model. Affinity constants [K_{D}] for human CEA (A2 domain) are summarized in Table 14 below.

TABLE 14
Affinity constants of Fab fragments representing
different humanized variants of murine CEA
antibody A5B7 to human CEA (A2 domain)

| | | Affinity to human |
|---|---|---|
| | | N(A2-B2)A-avi-His B |
| Tapir ID | Name | [M] |
| P1AE0289 | CEA (A5B7) Fab (parental | 5.59E−10 |
| | murine antibody) | |
| P1AE4135 | Fab derived from P1AE2164 | 1.70E−09 |
| P1AE4136 | Fab derived from P1AE2165 | 1.25E−09 |
| P1AE4137 | Fab derived from P1AE2166 | 1.13E−08 |
| P1AE4138 | Fab derived from P1AE2167 | 1.47E−09 |
| P1AE4139 | Fab derived from P1AE2176 | 7.58E−09 |
| P1AE4140 | Fab derived from P1AE2177 | 7.62E−09 |
| P1AE4141 | Fab derived from P1AE2179 | 1.83E−09 |
| P1AE4142 | Fab derived from P1AE2181 | 2.64E−09 |
| P1AE4143 | Fab derived from P1AE2182 | 2.92E−09 |

[0978] The humanized variants of the murine CEA antibody A5B7 are of lower affinities than the parental murine antibody. The Fab fragment P1AE4138, derived from P1AE2167 (heavy chain with VH variant 3-23A5-1A and Ckappa light chain with VL variant A5-L1D) was chosen as final humanized variant. Moreover, a glycine to alanine mutation at Kabat position 54 (G54A) was introduced into the VH domain in order to remove a deamidation site, leading to VL variant 3-23A5-1E. The final humanized antibody (heavy chain with VH variant 3-23A5-1E and Ckappa light chain with VL variant A5-L1D) has been named A5H1EL1D or huA5B7.

### 10.2 Generation of A5H1EL1D-Derived Affinity-Matured Anti-CEA Antibodies

### 10.2.1 Preparation, Purification and Characterization of Antigens for Phage Display Campaign

[0979] The murine antibody A5B7 and its humanized derivative A5H1EL1D bind to the A2 domain of CEACAM5 (CEA) with an affinity of about 0.8 and about 2.5 nM, respectively. For the generation of affinity-matured variants of A5H1EL1D by phage display, 3 different recombinant soluble antigens were generated. Each protein contained a C-terminal avi tag for site-specific biotinylation and a his-tag for purification: The first protein consisted of the extracellular part of CEACAM1 consisting of the 4 Ig-like domains N, Al, B, A2 (NABA-avi-His, SEQ ID NO: 238, Table 15). The second protein was a chimeric protein consisting of 2 CEACAM5 and 2 CEACAM1 Ig domains. Based on the sequence of the four domains of CEACAM1, the DNA encoding the second and third domain of CEACAM1 (A1 and B domains) was replaced by the DNA encoding the A2 and B2 domains of CEACAM5 (N(A2B2)A-avi-His, SEQ ID NO:239, Table 15). The third protein was a chimeric protein consisting of 1 CEACAM5 and 3 CEACAM1 Ig domains. Based on the sequence of the four domains of CEACAM1, the DNA encoding the third domain of CEACAM1 (B domain) was replaced by the DNA encoding the B2 domain of CEACAM5 (NA(B2)A-avi-His, SEQ ID NO:240, Table 15). A schematic description of the three constructs is shown in FIGS. 19A, 19B and 19C.

TABLE 15
Amino acid sequences of used CEA antigens

| | | SEQ ID |
|---|---|---|
| Antigen | Sequence | NO |
| NABA-avi- | QLTTESMPFNVAEGKEVLLLVHNLPQQLFGYSWYKGERVDGNRQIVGYAIGT | 238 |
| His | QQATPGPANSGRETIYPNASLLIQNVTQNDTGFYTLQVIKSDLVNEEATGQF | |
| | HVYPELPKPSISSNNSNPVEDKDAMAFTCEPETQDTTYLWWINNQSLPVSPR | |
| | LQLSNGNRTLTLLSVTRNDTGPYECEIQNPVSANRSDPVTLNVTYGPDTPTI | |
| | SPSDTYYRPGANLSLSCYAASNPPAQYSWLINGTFQQSTQELFIPNITVNNS | |
| | GSYTCHANNSVTGCNRTTVKTIIVTELSPVVAKPQIKASKTTVTGDKDSVNL | |
| | TCSTNDTGISIRWFFKNQSLPSSERMKLSQGNITLSINPVKREDAGTYWCEV | |
| | FNPISKNQSDPIMLNVNYNALPQENLINVDLEVLFQGPGSGLNDIFEAQKIE | |
| | WHEARAHHHHHH | |
| N(A2B2)A- | QLTTESMPFNVAEGKEVLLLVHNLPQQLFGYSWYKGERVDGNRQIVGYAIGT | 239 |
| avi-His | QQATPGPANSGRETIYPNASLLIQNVTQNDTGFYTLQVIKSDLVNEEATGQF | |
| | HVYPELPKPFITSNNSNPVEDEDAVALTCEPEIQNTTYLWWVNNQSLPVSPR | |
| | LQLSNDNRTLTLLSVTRNDVGPYECGIQNKLSVDHSDPVILNVLYGPDDPTI | |
| | SPSYTYYRPGVNLSLSCHAASNPPAQYSWLIDGNIQQHTQELFISNITEKNS | |
| | GLYTCQANNSASGHSRTTVKTITVSALSPVVAKPQIKASKTTVTGDKDSVNL | |
| | TCSTNDTGISIRWFFKNQSLPSSERMKLSQGNITLSINPVKREDAGTYWCEV | |
| | FNPISKNQSDPIMLNVNYNALPQENLINVDGSGLNDIFEAQKIEWHEARAHH | |
| | HHHH | |
| NA(B2)A- | QLTTESMPFNVAEGKEVLLLVHNLPQQLFGYSWYKGERVDGNRQIVGYAIGT | 240 |
| avi-His | QQATPGPANSGRETIYPNASLLIQNVTQNDTGFYTLQVIKSDLVNEEATGQF | |
| | HVYPELPKPSISSNNSNPVEDKDAMAFTCEPETQDTTYLWWINNQSLPVSPR | |
| | LQLSNGNRTLTLLSVTRNDTGPYECEIQNPVSANRSDPVTLNVTYGPDDPTI | |
| | SPSYTYYRPGVNLSLSCHAASNPPAQYSWLIDGNIQQHTQELFISNITEKNS | |
| | GLYTCQANNSASGHSRTTVKTITVSALSPVVAKPQIKASKTTVTGDKDSVNL | |
| | TCSTNDTGISIRWFFKNQSLPSSERMKLSQGNITLSINPVKREDAGTYWCEV | |
| | FNPISKNQSDPIMLNVNYNALPQENLINVDGSGLNDIFEAQKIEWHEARAHH | |
| | HHHH | |

[0980] The respective plasmids were transiently transfected into HEK 293 cells, stably expressing the EBV-derived protein EBNA (HEK EBNA). A simultaneously co-transfected plasmid encoding the biotin ligase BirA allowed avi-tag-specific biotinlylation in vivo. Proteins were purified from filtered cell culture supernatants referring to standard protocols using immobilized metal affinity chromatography (IMAC) followed by gel filtration. Monomeric protein fractions were pooled, concentrated (if required), frozen and stored at −80° C. Part of the samples were provided for subsequent protein analytics and analytical characterization e.g. by SDS-PAGE, size exclusion chromatography (SEC) or mass spectrometry.

### 10.2.2 Selection of Affinity Matured A5H1EL1D-Derived Antibodies

[0981] Humanization of antibody A5B7 resulted in an about 3 to 4-fold reduction of the affinity to CEA measured by SPR. While the affinity for A5B7 was about 0.8 nM, an affinity of about 2.5 nM was measured for A5H1EL1D. FACS experiments using cell lines with different CEA expression levels confirmed this finding. In order to improve the affinity of the humanized clone A5H1EL1D, 3 different affinity-maturation libraries were made and used for the selection of clones with improved affinities by phage display.

[0982] 10.2.2.1 Generation of A5H1EL1D Affinity Maturation Libraries

[0983] Generation of affinity-matured A5H1EL1D-derived antibodies was carried out by phage display using standard protocols (Silacci et al, 2005). In a first step, DNA sequences encoding the VH and VL of the humanized parental clone A5H1EL1D (amino acid sequences SEQ ID Nos: 186 and 187) were cloned into a phagemid which was then used as a template for randomization. In a next step, three libraries were generated for the selection of favourable clones by phage display. Maturation libraries 1 and 2 were randomized either in CDR1 and CDR2 of the heavy chain or in CDR1 and CDR2 of the light chain. The third maturation library was randomized in the CDR3 regions of both the heavy and the light chain. The randomized positions in the respective CDR regions are shown in FIGS. 20A and 20B. For the generation of the maturation library 1, randomized in CDR1 and 2 of the heavy chain, two fragments were assembled by “splicing by overlapping extension” (SOE) PCR and cloned into the phage vector (FIG. 21A). The following primer combinations were used to generate the library fragments: fragment 1 (LMB3 (SEQ ID NO: 243, Table 16) and A5H1EL1D_Hi_rev_TN (SEQ ID NO: 241, Table 16) and fragment 2 (A5H1EL1D_H2 for TN (SEQ ID NO: 242, Table 7) and HCDR3-rev-constant (SEQ ID NO: 244, Table 16).

TABLE 16
Primers for A5H1EL1D affinity maturation library H1 / H2

| | | SEQ ID |
|---|---|---|
| Name | Sequence | NO: |
| A5H1EL1D | CAG CCA CTC GAG GCC TTT ACC CGG TGC TTG GCG | 241 |
| _H1_rev_TN | TAC CCA X17 CAT X16 X15 X14 X13 GAA X12 GAA | |
| | GCC AGA AGC CGC GCA GCT GAG ACG | |
| | X12: 60% T; 5% A/S/G/Y/N/D/E/Q | |
| | X13: 50% T; 20% S; 4.3% A/G/Y/N/D/E/Q | |
| | X14: 50% D; 20% S; 4.3% G/Y/T/N/A/E/Q | |
| | X15: 60% Y; 4% G/V/H/S/E/Q/N/D/R/F | |
| | X16: 50% Y; 20% A; 3.75% G/V/T/H/L/I/R/F | |
| | X17: 50% N; 20% S; 3% D/E/Q/G/Y/V/T/H/A/L | |
| A5H1EL1D | CGC CAA GCA CCG GGT AAA GGC CTC GAG TGG CTG | 242 |
| _H2_for_TN | GGT X18 ATC X19 X20 X21 X22 X23 GCG TAC ACC | |
| | ACG GAA TAC TCC GCC TCC | |
| | X18: 60% F; 10% A; 6% Y/V/L/I/G | |
| | X19: 50% G; 20% S; 3% A/K/T/V/N/D/E/Q/L/I | |
| | X20: 50% N; 20% G; 3.75% D/E/Q/S/Y/T/H/A | |
| | X21: 60% K; 5% A/T/Y/N/D/E/Q/R | |
| | X22: 60% A; 4% V/G/D/P/H/N/E/Q/L/I | |
| | X23: 60% N; 5% D/E/Q; 4.17% G/T/H/S/A/R | |
| LMB3 long | CAG GAA ACA GCT ATG ACC ATG ATT AC | 243 |
| HCDR3-rev- | AAC GGT CAC CGT GGT ACC CTG GCC CCA GTA GTC | 244 |
| constant | GAA ATA GAA GCG CAG ACC AC | |

[0984] For the generation of the maturation library 2, randomized in CDR1 and 2 of the light chain, two fragments were assembled by “splicing by overlapping extension” (SOE) PCR and cloned into the phage vector (FIG. 21B). The following primer combinations were used to generate the library fragments: fragment 1 (LMB3 (SEQ ID NO: 243, Table 17) and A5H1EL1D_L1_rev_TN (SEQ ID NO: 245, Table 17) and fragment 2 (A5H1EL1D_L2_for_TN (SEQ ID NO: 246, Table 17) and HCDR3-rev-constant (SEQ ID NO: 244, Table 17).

TABLE 17
Primers for A5H1EL1D affinity maturation library L1 / L2

| | | SEQ ID |
|---|---|---|
| Name | Sequence | NO: |
| A5H1EL1D | GGA ACG CGG GGC CTG GCC TGG TTT TTG CTG ATA | 245 |
| _L1_rev_TN | CCA X06 X05 X04 X03 X02 X01 GCT GGA TGC GCG | |
| | GCA AGA CAG GGT AGC ACG | |
| | X01: 50% S; 20% V; 3.33% T/A/G/N/D/E/Q/Y/H | |
| | X02: 50% V; 20% S; 3.33% T/A/G/N/Q/F/Y/P/H | |
| | X03: 50% T; 20% S; 2.72% | |
| | A/G/Y/V/P/H/N/D/E/Q/R | |
| | X04: 60% Y; 4% F/G/A/V/T/H/S/N/Q/R | |
| | X05: 70% I; 30% L | |
| | X06: 50% H; 20% A; 3.33% R/K/G/S/T/Q/Y/N/V | |
| A5H1EL1D | CAG CAA AAA CCA GGC CAG GCC CCG CGT TCC TGG | 246 |
| _L2_for_TN | ATC X07 X08 X09 X10 X11 CTC GCT TCT GGT ATC | |
| | CCG GCA CGT TTC TCC GGC | |
| | X07: 60% Y; 10% F; 7.5% H/K/N/S | |
| | X08: 50% A; 20% D; 3.33% V/G/S/T/Y/H/N/E/Q | |
| | X09: 50% T; 20% A; 3.33% S/G/V/F/H/N/D/E/Q | |
| | X10: 60% S; 4% T/A/G/N/D/E/Q/Y/V/H | |
| | X11: 60% N; 4% D/E/Q/Y/K/T/H/S/A/R | |
| LMB3 long | CAG GAA ACA GCT ATG ACC ATG ATT AC | 243 |
| HCDR3-rev- | AAC GGT CAC CGT GGT ACC CTG GCC CCA GTA GTC | 244 |
| constant | GAA ATA GAA GCG CAG ACC AC | |

[0985] For the generation of the maturation library 3, randomized in CDR3 of the light and heavy chains, two fragments were assembled by “splicing by overlapping extension” (SOE) PCR and cloned into the phage vector (FIG. 21C). The following primer combinations were used to generate the library fragments: fragment 1 (LMB3 (SEQ ID NO:243, Table 18) and LCDR3-rev-constant (SEQ ID NO:249, Table 18) and fragment 2 (A5H1EL1D_L3_for TN (SEQ ID NO: 247, Table 18) and A5H1EL1D_H3_rev_TN (SEQ ID NO: 248, Table 18).

TABLE 18
Primers for A5H1EL1D affinity maturation library L3 / H3

| | | SEQ ID |
|---|---|---|
| Name | Sequence | NO: |
| A5H1EL1D | GAG CCT GAA GAT TTT GCC GTA TAC TAT TGT X24 | 247 |
| _L3_for_TN | X25 X26 X27 X28 X29 X30 X31 ACT TTC GGT CAG | |
| | GGC ACC AAG CTG GAA ATC | |
| | X24: 90% Q; 10% H | |
| | X25: 60% H; 5% R/K/Q/E/Y/F/N/D | |
| | X26: 65% W; 7% F/Y/V/L/I | |
| | X27: 58% S; 4% T/A/G/N/D/E/Q; 2% | |
| | Y/V/P/H/L/I/R | |
| | X28: 58% S; 4% T/A/G/N/D/E/Q; 2% | |
| | Y/V/P/H/L/I/R | |
| | X29: 60% K; 5% R/H; 2.72% | |
| | A/V/T/P/Y/N/D/E/Q/L/I | |
| | X30: 70% P; 5% A/S/T/R/S/L | |
| | X31: 60% P; 5% L/G/R/M; 2.86% A/V/L/I/F/S/R | |
| A5H1EL1D | AAC GGT CAC CGT GGT ACC CTG GCC CCA GTA GTC | 248 |
| _H3_rev_TN | X40 X39 X38 X37 X36 X35 X34 X33 X32 AGT ACA | |
| | GTA GTA GGT GGC GGT GTC TTC TGC | |
| | X32: 60% R; 10% K; 2.72% | |
| | A/V/T/P/Y/N/D/E/Q/L/H | |
| | X33: 60% D; 5% N/E/Q; 2.5% | |
| | G/Y/V/T/H/S/A/L/I/R | |
| | X34: 60% R; 5% K/H; 2.72% | |
| | A/V/T/P/Y/N/D/E/Q/L/I | |
| | X35: 60% G; 5% A/S/T; 2.5% | |
| | Y/V/P/H/N/D/E/Q/L/I | |
| | X36: 60% L; 4% I/V/A/F; 2.4% | |
| | G/Y/T/P/H/S/N/D/E/Q | |
| | X37: 60% R; 5% K/H; 2.72% | |
| | A/V/T/P/Y/N/D/E/Q/L/I | |
| | X38: 65% F; 5% Y/W/A/V/L/I/G | |
| | X39: 60% Y; 5% F/W; 2.14% | |
| | G/A/V/T/P/H/S/N/D/E/Q/L/I/R | |
| | X40: 80% F; 10% I/L | |
| LCDR3-rev- | ACA ATA GTA TAC GGC AAA ATC TTC AGG CTC | 249 |
| constant | | |
| LMB3 long | CAG GAA ACA GCT ATG ACC ATG ATT AC | 243 |
| HCDR3 | AGA AAC GGT CAC CGT GGT ACC CTG GCC CCA GTA | 250 |
| amplification | GTC | |

[0986] For the assembly of the fragments of each library, equimolar amounts of each fragment were used and amplified with the respective outer primers. For the assembly of the fragments of the third library, randomized in HCDR3 and LCDR3, primer LMB3 (SEQ ID NO:243, Table 18) was used in combination with the primer “HCDR3 amplification” (SEQ ID NO:250, Table 18). This primer was used in order to extend the C-terminal end of VH with the sequence containing a KpnI site. After assembly of sufficient amounts of full length randomized fragments for all libraries, they were digested with NcoI/KpnI alongside with identically treated acceptor phagemid vector. A 3-fold molar excess of library insert was ligated with 20 μg of phagemid vector. Purified ligations were used for 20 transformations resulting in about 0.7×10⁹ to 2×10⁹ transformants. Phagemid particles displaying the A5H1EL1D affinity maturation libraries were rescued and purified by PEG/NaCl purification to be used for selections.

[0987] 10.2.2.2 Selection of Affinity Matured A5H1EL1D-Derived Clones

[0988] For the selection of affinity-matured clones, phage display selection with all 3 libraries was performed using recombinant soluble antigens. Panning rounds were performed in solution according to the following pattern: 1. Pre-clearing of non-specific phagemid particles by incubation with 200 nM biotinylated NA(B2)A-avi-His and NABA-avi-his for 0.5 h, 2. capture of biotinylated NA(B2)A-avi-His, NABA-avi-his, and bound phagemid particles by addition of 5.4×10⁷ streptavidin-coated magnetic beads for 10 min, 3. Isolation of non-bound phagemid particles from supernatant for further selection, 4. binding of phagemid particles to 20 nM biotinylated N(A2B2)A-avi-His for 0.5 h in a total volume of 1 ml, 5. capture of biotinylated N(A2B2)A-avi-His protein and specifically bound phage particles by addition of 5.4×10⁷ streptavidin-coated magnetic beads for 10 min, 6. washing of beads using 5×1 ml PBS/Tween20 and 5×1 ml PBS, 7. elution of phage particles by addition of 1 ml of 100 mM TEA for 10 min and neutralization by adding 500 μl 1M Tris/HCl pH 7.4, 8. infection of exponentially growing E. coli TG1 bacteria, 9.infection with helperphage VCSM13, and 10. subsequent PEG/NaCl precipitation of phagemid particles to be used in subsequent selection rounds. Selections were carried out over 3 rounds using decreasing antigen concentrations (20×10⁻⁹ M, 10×10⁻⁹ M, and 2×10⁻⁹ M). In round 3, streptavidin beads were washed with 20 ×1 ml PBS/Tween20 and 5 ×1 ml PBS.

[0989] Specific binders were identified by ELISA as follows: 100 μl of either 10 nM biotinylated N(A2B2)A-avi-His protein or 40 nM biotinylated NA(B2)A-avi-His protein per well were coated on neutravidin plates. Fab-containing bacterial supernatants were added and binding Fabs were detected via their Flag-tags using an anti-Flag/HRP secondary antibody. Clones that were ELISA-positive on recombinant N(A2B2)A-avi-His protein but not on NA(B2)A-avi-His protein were further tested by SPR.

[0990] 10.2.2.3 Identification of Affinity-Matured A5H1EL1D-Derived Variants by SPR

[0991] In order to further characterize the ELISA-positive clones, the off-rate was measured by surface plasmon resonance using a Proteon XPR36 machine and the results were compared with the parental humanized clone A5H1EL1D.

[0992] For this experiment, about 2000, 1000, and 500 RU of biotinylated N(A2B2)A-avi-His were immobilized on 3 channels using a Streptavidin-coated NLC chip in vertical orientation. As a control for non-specific binding, 2000 RU of biotinylated NA(B2)A-avi-His protein was immobilized on channel 4. For the off-rate analysis of the identified ELISA-positive clones, injection direction was changed to horizontal orientation. Before injection, each Fab-containing bacterial supernatant was filtered and 3-fold diluted with PBS. The association time was 100s at 100 μl/minute and dissociation times were either 600 or 1200 s. Bacterial supernatant without Fab fragment was used for referencing. Regeneration was performed with 10 mM glycine pH 1.5 for 35s at 50 μl/min (vertical orientation).

[0993] Dissociation rate constants (koff) were calculated using a simple one-to-one Langmuir binding model in ProteOn Manager v3.1 software by simultaneously fitting the sensorgrams. Clones expressing Fabs with the slowest dissociation rate constants were identified and shortlisted. Shortlisted clones were re-evaluated in an additional SPR experiments under the same conditions. This time, during each injection, 4 affinity-matured clones were directly compared in parallel with the parental clone A5H1EL1D. Bacterial supernatant without Fab fragment was used for referencing. Clones that showed a slower dissociation rate than A5H1EL1D on N(A2B2)A-avi-His and no binding to NA(B2)A-avi-His were selected and the variable domains of the corresponding phagemids were sequenced. The measured dissociation rates of the best clones are shown in Table 19 and the sequences of the respective variable domains are listed in Table 20.

TABLE 19
Kinetic dissociation constants (koff) of selected clones
obtained in screening analysis with bacterial supernatant

| clone | Dissociation constant kd (1/s) |
|---|---|
| A5H1EL1D | 3.10E−04 |
| P006.038 | 7.41E−05 |
| P005.097 | 8.87E−05 |
| P005.103 | 5.37E−05 |
| P002.139 | 6.47E−05 |
| P001.177 | 9.81E−05 |
| P005.102 | 4.24E−05 |

TABLE 20
Amino acid sequences of the parental clone A5H1EL1D and selected affinity-
matured clones

| | | SEQ ID | |
|---|---|---|---|
| Clone | Chain | NO | Sequence |
| A5H1EL1D | VL | 187 | EIVLTQSPATLSLSPGERATLSCRASSSVTYIHWY |
| | | | QQKPGQAPRSWIYATSNLASGIPARFSGSGSGTDF |
| | | | TLTISSLEPEDFAVYYCQHWSSKPPTFGQGTKLEI |
| | | | K |
| | VH | 186 | EVQLLESGGGLVQPGGSLRLSCAASGFTFTDYYMN |
| | | | WVRQAPGKGLEWLGFIGNKANAYTTEYSASVKGRF |
| | | | TISRDKSKNTLYLQMNSLRAEDTATYYCTRDRGLR |
| | | | FYFDYWGQGTTVTVSS |
| P006.038 | VL | 195 | EIVLTQSPATLSLSPGERATLSCRASSSVTYIHWY |
| | | | QQKPGQAPRSWIYATSNLASGIPARFSGSGSGTDF |
| | | | TLTISSLEPEDFAVYYCQHWSSVPPTFGQGTKLEI |
| | | | K |
| | VH | 194 | EVQLLESGGGLVQPGGSLRLSCAASGFTFTDYYMN |
| | | | WVRQAPGKGLEWLGFIGNKANAYTTEYSASVKGRF |
| | | | TISRDKSKNTLYLQMNSLRAEDTATYYCTRDRGIR |
| | | | FGFDYWGQGTTVTVSS |
| P005.097 | VL | 197 | EIVLTQSPATLSLSPGERATLSCRASSSVTYIHWY |
| | | | QQKPGQAPRSWIYATSNLASGIPARFSGSGSGTDF |
| | | | TLTISSLEPEDFAVYYCQHWSSQPPTFGQGTKLEI |
| | | | K |
| | VH | 196 | EVQLLESGGGLVQPGGSLRLSCAASGFTFTDYYMN |
| | | | WVRQAPGKGLEWLGFIGNKANAYTTEYSASVKGRF |
| | | | TISRDKSKNTLYLQMNSLRAEDTATYYCTRDRGLR |
| | | | FSFDYWGQGTTVTVSS |
| P005.103 | VL | 199 | EIVLTQSPATLSLSPGERATLSCRASSSVTYIHWY |
| | | | QQKPGQAPRSWIYATSNLASGIPARFSGSGSGTDF |
| | | | TLTISSLEPEDFAVYYCQHWSSISPTFGQGTKLEI |
| | | | K |
| | VH | 198 | EVQLLESGGGLVQPGGSLRLSCAASGFTFTDYYMN |
| | | | WVRQAPGKGLEWLGFIGNKANAYTTEYSASVKGRF |
| | | | TISRDKSKNTLYLQMNSLRAEDTATYYCTRDRGIR |
| | | | FYFDYWGQGTTVTVSS |
| P002.139 | VL | 201 | EIVLTQSPATLSLSPGERATLSCHASSSVTYIHWY |
| | | | QQKPGQAPRSWIYATSNLASGIPARFSGSGSGTDF |
| | | | TLTISSLEPEDFAVYYCQHWSSKPPTFGQGTKLEI |
| | | | K |
| | VH | 200 | EVQLLESGGGLVQPGGSLRLSCAASGFYFTDYAMN |
| | | | WVRQAPGKGLEWLGVISNKANAYTTEYSASVKGRF |
| | | | TISRDKSKNTLYLQMNSLRAEDTATYYCTRDRGLR |
| | | | FYFDYWGQGTTVTVSS |
| P001.177 | VL | 203 | EIVLTQSPATLSLSPGERATLSCRASSSVTYIHWY |
| | | | QQKPGQAPRSWIYATSNLASGIPARFSGSGSGTDF |
| | | | TLTISSLEPEDFAVYYCQHWSSKPPTFGQGTKLEI |
| | | | K |
| | VH | 202 | EVQLLESGGGLVQPGGSLRLSCAASGFYFTDYYMN |
| | | | WVRQAPGKGLEWLGFISNKANAYTTEYSASVKGRF |
| | | | TISRDKSKNTLYLQMNSLRAEDTATYYCTRDRGLR |
| | | | FYFDYWGQGTTVTVSS |
| P005.102 | VL | 205 | EIVLTQSPATLSLSPGERATLSCRASSSVTYIHWY |
| | | | QQKPGQAPRSWIYATSNLASGIPARFSGSGSGTDF |
| | | | TLTISSLEPEDFAVYYCQHWSSKSPTFGQGTKLEI |
| | | | K |
| | VH | 204 | EVQLLESGGGLVQPGGSLRLSCAASGFTFTDYYMN |
| | | | WVRQAPGKGLEWLGFIGNKANAYTTEYSASVKGRF |
| | | | TISRDKSKNTLYLQMNSLRAEDTATYYCTRDRGIR |
| | | | FQFDYWGQGTTVTVSS |
| P005.102- | VL | 207 | EIVLTQSPATLSLSPGERATLSCRASSSVTYIHWY |
| combo1 | | | QQKPGQAPRSWIYATSNLASGIPARFSGSGSGTDF |
| | | | TLTISSLEPEDFAVYYCQHWSSKSPTFGQGTKLEI |
| | | | K |
| | VH | 206 | EVQLLESGGGLVQPGGSLRLSCAASGFYFTDYYMN |
| | | | WVRQAPGKGLEWLGVISNKANAYTTEYSASVKGRF |
| | | | TISRDKSKNTLYLQMNSLRAEDTATYYCTRDRGIR |
| | | | FQFDYWGQGTTVTVSS |
| P005.102- | VL | 209 | EIVLTQSPATLSLSPGERATLSCRASSSVTYIHWY |
| combo2 | | | QQKPGQAPRSWIYATSNLASGIPARFSGSGSGTDF |
| | | | TLTISSLEPEDFAVYYCQHWSSKSPTFGQGTKLEI |
| | | | K |
| | VH | 208 | EVQLLESGGGLVQPGGSLRLSCAASGFYFSDYYMN |
| | | | WVRQAPGKGLEWLGVISNKANAYTTEYSASVKGRF |
| | | | TISRDKSKNTLYLQMNSLRAEDTATYYCTRDRGIR |
| | | | FQFDYWGQGTTVTVSS |
| P005.103- | VL | 211 | EIVLTQSPATLSLSPGERATLSCRASSSVTYIHWY |
| combo1 | | | QQKPGQAPRSWIYATSNLASGIPARFSGSGSGTDF |
| | | | TLTISSLEPEDFAVYYCQHWSSISPTFGQGTKLEI |
| | | | K |
| | VH | 210 | EVQLLESGGGLVQPGGSLRLSCAASGFTFTDYYMN |
| | | | WVRQAPGKGLEWLGFIGNKANAYTTEYSASVKGRF |
| | | | TISRDKSKNTLYLQMNSLRAEDTATYYCTRDRGIR |
| | | | FSFDYWGQGTTVTVSS |
| P005.103- | VL | 213 | EIVLTQSPATLSLSPGERATLSCRASSSVTYIHWY |
| combo2 | | | QQKPGQAPRSWIYATSNLASGIPARFSGSGSGTDF |
| | | | TLTISSLEPEDFAVYYCQHWSSISPTFGQGTKLEI |
| | | | K |
| | VH | 212 | EVQLLESGGGLVQPGGSLRLSCAASGFYFTDYYMN |
| | | | WVRQAPGKGLEWLGVISNKANAYTTEYSASVKGRF |
| | | | TISRDKSKNTLYLQMNSLRAEDTATYYCTRDRGIR |
| | | | FSFDYWGQGTTVTVSS |
| P006.038- | VL | 215 | EIVLTQSPATLSLSPGERATLSCRASSSVTYIHWY |
| combo1 | | | QQKPGQAPRSWIYATSNLASGIPARFSGSGSGTDF |
| | | | TLTISSLEPEDFAVYYCQHWSSVPPTFGQGTKLEI |
| | | | K |
| | VH | 214 | EVQLLESGGGLVQPGGSLRLSCAASGFYFTDYAMN |
| | | | WVRQAPGKGLEWLGVISNKANAYTTEYSASVKGRF |
| | | | TISRDKSKNTLYLQMNSLRAEDTATYYCTRDRGIR |
| | | | FGFDYWGQGTTVTVSS |
| P006.038- | VL | 217 | EIVLTQSPATLSLSPGERATLSCRASSSVTYIHWY |
| combo2 | | | QQKPGQAPRSWIYATSNLASGIPARFSGSGSGTDF |
| | | | TLTISSLEPEDFAVYYCQHWSSVPPTFGQGTKLEI |
| | | | K |
| | VH | 216 | EVQLLESGGGLVQPGGSLRLSCAASGFTFSDYEMN |
| | | | WVRQAPGKGLEWLGFISNKANAYTTEYSASVKGRF |
| | | | TISRDKSKNTLYLQMNSLRAEDTATYYCTRDRGIR |
| | | | FGFDYWGQGTTVTVSS |

[0994] 10.2.2.4 Fab Purification of Affinity-Matured A5H1EL1D Clones In order to further characterize the affinity-matured clones, the respective Fab fragments were purified for the exact analysis of the kinetic parameters. For each clone, a 500 ml culture was inoculated with bacteria harboring the corresponding phagemid and induced with 1 mM IPTG at an optical density measured at 600 nm (OD600) of 0.9. Afterwards, the cultures were incubated at 25° C. overnight and harvested by centrifugation. After incubation of the re-suspended pellet for 20 min in 25 ml PPB buffer (30 mM Tris-HCl pH8, 1 mM EDTA, 20% sucrose), bacteria were centrifuged again and the supernatant was harvested. This incubation step was repeated once with 25 ml of a 5 mM MgSO4 solution. The supernatants of both incubation steps were pooled, filtered and loaded on an IMAC column (His gravitrap, GE Healthcare). Subsequently, the column was washed with 40 ml washing buffer (500 mM NaCl, 20 mM Imidazole, 20 mM NaH₂PO₄ pH 7.4). After the elution (500 mM NaCl, 500 mM Imidazole, 20 mM NaH₂PO₄ pH 7.4) the eluate was re-buffered using PD10 columns (GE Healthcare). The yield of purified protein was in the range of 300 to 500 μg/l.

[0995] 10.2.2.5 SPR Analysis of Purified Affinity-Matured A5H1EL1D Fab Fragments

[0996] Affinity (K_{D}) of purified Fab fragments was measured by surface plasmon resonance using a Proteon XPR36 machine using the same setup as described before.

[0997] About 2000, 1000, 500, and 250 RU of biotinylated N(A2B2)A-avi-His were immobilized on 4 channels of a Streptavidin-coated NLC chip in vertical orientation. As a control for non-specific binding, 2000 RU of biotinylated NA(B2)A-avi-His protein was immobilized on channel 5. For the determination of the affinity (K_{D}) of the purified clones, injection direction was changed to horizontal orientation. Two-fold dilution series of purified Fab fragments (varying concentration ranges between 100 and 3 nM) were injected simultaneously at 100 μl/min along separate channels 1-5, with association times of 100s, and dissociation times of 1200s. Buffer (PBST) was injected along the sixth channel to provide an “in-line” blank for referencing. Regeneration was performed with 10 mM glycine pH 1.5 for 35s at 50 μl/min (vertical orientation).

[0998] Association rate constants (kon) and dissociation rate constants (koff) were calculated using a simple one-to-one Langmuir binding model in ProteOn Manager v3.1 software by simultaneously fitting the association and dissociation sensorgrams. The equilibrium dissociation constant (K_{D}) was calculated as the ratio koff/kon. The kinetic and thermodynamic data are listed in Table 21.

TABLE 21
Determination of kinetic and thermodynamic
parameters of purified Fab-fragments by SPR

| Clone ID | k on (1/Ms) | k off (1/s) | K_{D} (nM) |
|---|---|---|---|
| A5H1EL1D | 1.08E+5 | 2.48E−4 | 2.3 |
| P006.038 | 2.25E+5 | 5.78E−5 | 0.25 |
| P005.097 | 0.94E+5 | 8.54E−5 | 0.91 |
| P005.103 | 1.00E+5 | 4.99E−5 | 0.5 |
| P002.139 | 1.05E+5 | 6.53E−5 | 0.63 |
| P001.177 | 2.67E+5 | 7.85E−4 | 0.29 |
| P005.102 | 1.34E+5 | 3.92E−4 | 0.29 |

[0999] 10.2.2.6 Combination of CDR Positions of Affinity-Matured Clones

[1000] In an attempt to further increase the affinity to CEA, CDR positions of several previously identified affinity-matured binders were combined with each other. This includes not only specific positions within a CDR but also combinations of CDRs from different binders. An alignment of all clones, phage display-derived and combinatorial clones, is shown in FIGS. 22A and 22B. The CDRs of all heavy chains and light chains are listed in Table 22 and 23, respectively. The VH and VL domains are summarized in Table 20.

TABLE 22
CDR sequences of affinity-matured heavy chains

| | SEQ | | SEQ | | SEQ | |
|---|---|---|---|---|---|---|
| | ID | | ID | | ID | |
| Clone | NO | CDR-H1 | NO | CDR-H2 | NO | CDR-H3 |
| A5H1EL1D | 180 | GFTFTDYY | 181 | FIGNKANAYTTE | 182 | DRGLRFYF |
| | | MN | | YSASVKG | | DY |
| P006.038 | 251 | GFTFTDYY | 252 | FIGNKANAYTTE | 253 | DRGIRFGF |
| | | MN | | YSASVKG | | DY |
| P005.097 | 257 | GFTFTDYY | 258 | FIGNKANAYTTE | 259 | DRGLRFSF |
| | | MN | | YSASVKG | | DY |
| P005.103 | 263 | GFTFTDYY | 264 | FIGNKANAYTTE | 265 | DRGIRFYF |
| | | MN | | YSASVKG | | DY |
| P002.139 | 269 | GFYFTDYA | 270 | VISNKANAYTTE | 271 | DRGLRFYF |
| | | MN | | YSASVKG | | DY |
| P001.177 | 275 | GFYFTDYY | 276 | FISNKANAYTTE | 277 | DRGLRFYF |
| | | MN | | YSASVKG | | DY |
| P005.102 | 281 | GFTFTDYY | 282 | FIGNKANAYTTE | 283 | DRGIRFQF |
| | | MN | | YSASVKG | | DY |
| P005.102- | 287 | GFYFTDYY | 288 | VISNKANAYTTE | 289 | DRGIRFQF |
| combo1 | | MN | | YSASVKG | | DY |
| P005.102- | 293 | GFYFSDYY | 294 | VISNKANAYTTE | 295 | DRGIRFQF |
| combo2 | | MN | | YSASVKG | | DY |
| P005.103- | 299 | GFTFTDYY | 300 | FIGNKANAYTTE | 301 | DRGIRFSF |
| combo1 | | MN | | YSASVKG | | DY |
| P005.103- | 305 | GFYFTDYY | 306 | VISNKANAYTTE | 307 | DRGIRFSF |
| combo2 | | MN | | YSASVKG | | DY |
| P006.038- | 311 | GFYFTDYA | 312 | VISNKANAYTTE | 313 | DRGIRFGF |
| combo1 | | MN | | YSASVKG | | DY |
| P006.038- | 317 | GFTFSDYE | 318 | FISNKANAYTTE | 319 | DRGIRFGF |
| combo2 | | MN | | YSASVKG | | DY |

TABLE 23
CDR sequences of affinity-matured light chains

| | SEQ | | SEQ | | SEQ | |
|---|---|---|---|---|---|---|
| | ID | | ID | | ID | |
| Clone | NO | CDR-L1 | NO | CDR-L2 | NO | CDR-L3 |
| A5H1EL1D | 183 | RASSSVTYI | 184 | ATSNLAS | 185 | QHWSSKPPT |
| | | H | | | | |
| P006.038 | 254 | RASSSVTYI | 255 | ATSNLAS | 256 | QHWSSVPPT |
| | | H | | | | |
| P005.097 | 260 | RASSSVTYI | 261 | ATSNLAS | 262 | QHWSSQPPT |
| | | H | | | | |
| P005.103 | 266 | RASSSVTYI | 267 | ATSNLAS | 268 | QHWSSISPT |
| | | H | | | | |
| P002.139 | 272 | HASSSVTYI | 273 | ATSNLAS | 274 | QHWSSKPPT |
| | | H | | | | |
| P001.177 | 278 | RASSSVTYI | 279 | ATSNLAS | 280 | QHWSSKPPT |
| | | H | | | | |
| P005.102 | 284 | RASSSVTYI | 285 | ATSNLAS | 286 | QHWSSKSPT |
| | | H | | | | |
| P005.102- | 290 | RASSSVTYI | 291 | ATSNLAS | 292 | QHWSSKSPT |
| combo1 | | H | | | | |
| P005.102- | 296 | RASSSVTYI | 297 | ATSNLAS | 298 | QHWSSKSPT |
| comb02 | | H | | | | |
| P005.103- | 302 | RASSSVTYI | 303 | ATSNLAS | 304 | QHWSSISPT |
| comb01 | | H | | | | |
| P005.103- | 308 | RASSSVTYI | 309 | ATSNLAS | 310 | QHWSSISPT |
| combo2 | | H | | | | |
| P006.038- | 314 | RASSSVTYI | 315 | ATSNLAS | 316 | QHWSSVPPT |
| comb01 | | H | | | | |
| P006.038- | 320 | RASSSVTYI | 321 | ATSNLAS | 322 | QHWSSVPPT |
| combo2 | | H | | | | |

### 10.3 Generation and Characterization of Affinity-Matured A5H1EL1D-Derived Bispecific Antibodies

### 10.3.1 Cloning, Production, and Purification of Bispecific Antibodies

[1001] The variable domains of all clones were synthesized and cloned into plasmids coding for a bispecific 1+1 IgG molecule based on the knob-into-hole mutations and the crossmab technology in combination with PG-LALA mutations. The second binding moiety was specific for CD28. A schematic description of the final molecules is drawn in FIG. 1J. The resulting molecules are composed of the sequences listed in Table 24: All chain combinations expressing the VL and the VH sequences of the affinity-matured binders (SEQ ID NOs: 323-348) were combined with the two chains specific for CD28 (SEQ ID NOs: 349 and 350).

[1002] Resulting constructs were prepared by Evitria using their proprietary vector system with conventional (non-PCR based) cloning techniques and using suspension-adapted CHO K1 cells (originally received from ATCC and adapted to serum-free growth in suspension culture at Evitria). For the production, Evitria used its proprietary, animal-component free and serum-free media (eviGrow and eviMake2) and its proprietary transfection reagent (eviFect). Proteins were purified from filtered cell culture supernatants referring to standard protocols. In brief, Fc containing proteins were purified from cell culture supernatants by affinity chromatography using Protein A. Elution was achieved at pH 3.0 followed by immediate neutralization of the sample. The protein was concentrated and aggregated protein was separated from monomeric protein by size exclusion chromatography in 20 mM histidine, 140 mM sodium chloride, pH 6.0.

TABLE 24
Amino acid sequences of the selected affinity-matured anti-CEA clones in
bispecific P326G LALA human IgG1 format

| | | SEQ ID | |
|---|---|---|---|
| Clone | chain | NO | Polypeptide sequence |
| A5H1EL | VL- | 323 | EVQLLESGGGLVQPGGSLRLSCAASGFTFTDYYMNWVRQAPGKGL |
| 1D | CH1- | | EWLGFIGNKANAYTTEYSASVKGRFTISRDKSKNTLYLQMNSLRA |
| | IgG1 | | EDTATYYCTRDRGLRFYFDYWGQGTTVTVSSASTKGPSVFPLAPS |
| | Fc- | | SKSTSGGTAALGCLVKDYFPEPVTVSWNSGALTSGVHTFPAVLQS |
| | (hole, | | SGLYSLSSVVTVPSSSLGTQTYICNVNHKPSNTKVDKKVEPKSCD |
| | PG- | | KTHTCPPCPAPEAAGGPSVFLFPPKPKDTLMISRIPEVTCVVVDV |
| | LALA) | | SHEDPEVKFNWYVDGVEVHNAKTKPREEQYNSTYRVVSVLTVLHQ |
| | | | DWLNGKEYKCKVSNKALGAPIEKTISKAKGQPREPQVCTLPPSRD |
| | | | ELTKNQVSLSCAVKGFYPSDIAVEWESNGQPENNYKTTPPVLDSD |
| | | | GSFFLVSKLTVDKSRWQQGNVFSCSVMHEALHNHYTQKSLSLSP |
| | VH-Ck | 324 | EIVLTQSPATLSLSPGERATLSCRASSSVTYIHWYQQKPGQAPRS |
| | | | WIYATSNLASGIPARFSGSGSGTDFTLTISSLEPEDFAVYYCQHW |
| | | | SSKPPTFGQGTKLEIKRTVAAPSVFIFPPSDEQLKSGTASVVCLL |
| | | | NNFYPREAKVQWKVDNALQSGNSQESVTEQDSKDSTYSLSSTLTL |
| | | | SKADYEKHKVYACEVTHQGLSSPVTKSFNRGEC |
| P006.038 | VL- | 325 | EIVLTQSPATLSLSPGERATLSCRASSSVTYIHWYQQKPGQAPRS |
| | CH1- | | WIYATSNLASGIPARFSGSGSGTDFTLTISSLEPEDFAVYYCQHW |
| | IgG1 | | SSVPPTFGQGTKLEIKSSASTKGPSVFPLAPSSKSTSGGTAALGC |
| | Fc- | | LVKDYFPEPVTVSWNSGALTSGVHTFPAVLQSSGLYSLSSVVTVP |
| | (hole, | | SSSLGTQTYICNVNHKPSNTKVDKKVEPKSCDKTHTCPPCPAPEA |
| | PG- | | AGGPSVFLFPPKPKDTLMISRTPEVTCVVVDVSHEDPEVKFNWYV |
| | LALA) | | DGVEVHNAKTKPREEQYNSTYRVVSVLTVLHQDWLNGKEYKCKVS |
| | | | NKALGAPIEKTISKAKGQPREPQVCTLPPSRDELTKNQVSLSCAV |
| | | | KGFYPSDIAVEWESNGQPENNYKTTPPVLDSDGSFFLVSKLTVDK |
| | | | SRWQQGNVFSCSVMHEALHNHYTQKSLSLSP |
| | VH-Ck | 326 | EVQLLESGGGLVQPGGSLRLSCAASGFTFTDYYMNWVRQAPGKGL |
| | | | EWLGFIGNKANAYTTEYSASVKGRFTISRDKSKNTLYLQMNSLRA |
| | | | EDTATYYCTRDRGIRFGFDYWGQGTTVTVSSASVAAPSVFIFPPS |
| | | | DEQLKSGTASVVCLLNNFYPREAKVQWKVDNALQSGNSQESVTEQ |
| | | | DSKDSTYSLSSTLTLSKADYEKHKVYACEVTHQGLSSPVTKSFNR |
| | | | GEC |
| P005.097 | VL- | 327 | EIVLTQSPATLSLSPGERATLSCRASSSVTYIHWYQQKPGQAPRS |
| | CH1- | | WIYATSNLASGIPARFSGSGSGTDFTLTISSLEPEDFAVYYCQHW |
| | IgG1 | | SSQPPTFGQGTKLEIKSSASTKGPSVFPLAPSSKSTSGGTAALGC |
| | Fc-(hole, | | LVKDYFPEPVTVSWNSGALTSGVHTFPAVLQSSGLYSLSSVVTVP |
| | PG- | | SSSLGTQTYICNVNHKPSNTKVDKKVEPKSCDKTHTCPPCPAPEA |
| | LALA) | | AGGPSVFLFPPKPKDTLMISRTPEVTCVVVDVSHEDPEVKFNWYV |
| | | | DGVEVHNAKTKPREEQYNSTYRVVSVLTVLHQDWLNGKEYKCKVS |
| | | | NKALGAPIEKTISKAKGQPREPQVCTLPPSRDELTKNQVSLSCAV |
| | | | KGFYPSDIAVEWESNGQPENNYKTTPPVLDSDGSFFLVSKLTVDK |
| | | | SRWQQGNVFSCSVMHEALHNHYTQKSLSLSP |
| | VH-Ck | 328 | EVQLLESGGGLVQPGGSLRLSCAASGFTFTDYYMNWVRQAPGKGL |
| | | | EWLGFIGNKANAYTTEYSASVKGRFTISRDKSKNTLYLQMNSLRA |
| | | | EDTATYYCTRDRGLRFSFDYWGQGTTVTVSSASVAAPSVFIFPPS |
| | | | DEQLKSGTASVVCLLNNFYPREAKVQWKVDNALQSGNSQESVTEQ |
| | | | DSKDSTYSLSSTLTLSKADYEKHKVYACEVTHQGLSSPVTKSFNR |
| | | | GEC |
| P005.103 | VL- | 329 | EIVLTQSPATLSLSPGERATLSCRASSSVTYIHWYQQKPGQAPRS |
| | CH1- | | WIYATSNLASGIPARFSGSGSGTDFTLTISSLEPEDFAVYYCQHW |
| | IgG1 | | SSISPTFGQGTKLEIKSSASTKGPSVFPLAPSSKSTSGGTAALGC |
| | Fc- | | LVKDYFPEPVTVSWNSGALTSGVHTFPAVLQSSGLYSLSSVVTVP |
| | (hole, | | SSSLGTQTYICNVNHKPSNTKVDKKVEPKSCDKTHTCPPCPAPEA |
| | PG- | | AGGPSVFLFPPKPKDTLMISRTPEVTCVVVDVSHEDPEVKFNWYV |
| | LALA) | | DGVEVHNAKTKPREEQYNSTYRVVSVLTVLHQDWLNGKEYKCKVS |
| | | | NKALGAPIEKTISKAKGQPREPQVCTLPPSRDELTKNQVSLSCAV |
| | | | KGFYPSDIAVEWESNGQPENNYKTTPPVLDSDGSFFLVSKLTVDK |
| | | | SRWQQGNVFSCSVMHEALHNHYTQKSLSLSP |
| | VH-Ck | 330 | EVQLLESGGGLVQPGGSLRLSCAASGFTFTDYYMNWVRQAPGKGL |
| | | | EWLGFIGNKANAYTTEYSASVKGRFTISRDKSKNTLYLQMNSLRA |
| | | | EDTATYYCTRDRGIRFYFDYWGQGTTVTVSSASVAAPSVFIFPPS |
| | | | DEQLKSGTASVVCLLNNFYPREAKVQWKVDNALQSGNSQESVTEQ |
| | | | DSKDSTYSLSSTLTLSKADYEKHKVYACEVTHQGLSSPVTKSFNR |
| | | | GEC |
| P002.139 | VL- | 331 | EIVLTQSPATLSLSPGERATLSCHASSSVTYIHWYQQKPGQAPRS |
| | CH1- | | WIYATSNLASGIPARFSGSGSGTDFTLTISSLEPEDFAVYYCQHW |
| | IgG1 | | SSKPPTFGQGTKLEIKSSASTKGPSVFPLAPSSKSTSGGTAALGC |
| | Fc- | | LVKDYFPEPVTVSWNSGALTSGVHTFPAVLQSSGLYSLSSVVTVP |
| | (hole, | | SSSLGTQTYICNVNHKPSNTKVDKKVEPKSCDKTHTCPPCPAPEA |
| | PG- | | AGGPSVFLFPPKPKDTLMISRTPEVTCVVVDVSHEDPEVKFNWYV |
| | LALA) | | DGVEVHNAKTKPREEQYNSTYRVVSVLTVLHQDWLNGKEYKCKVS |
| | | | NKALGAPIEKTISKAKGQPREPQVCTLPPSRDELTKNQVSLSCAV |
| | | | KGFYPSDIAVEWESNGQPENNYKTTPPVLDSDGSFFLVSKLTVDK |
| | | | SRWQQGNVFSCSVMHEALHNHYTQKSLSLSP |
| | VH-Ck | 332 | EVQLLESGGGLVQPGGSLRLSCAASGFYFTDYAMNWVRQAPGKGL |
| | | | EWLGVISNKANAYTTEYSASVKGRFTISRDKSKNTLYLQMNSLRA |
| | | | EDTATYYCTRDRGLRFYFDYWGQGTTVTVSSASVAAPSVFIFPPS |
| | | | DEQLKSGTASVVCLLNNFYPREAKVQWKVDNALQSGNSQESVTEQ |
| | | | DSKDSTYSLSSTLTLSKADYEKHKVYACEVTHQGLSSPVTKSFNR |
| | | | GEC |
| P001.177 | VL- | 333 | EIVLTQSPATLSLSPGERATLSCRASSSVTYIHWYQQKPGQAPRS |
| | CH1- | | WIYATSNLASGIPARFSGSGSGTDFTLTISSLEPEDFAVYYCQHW |
| | IgG1 | | SSKPPTFGQGTKLEIKSSASTKGPSVFPLAPSSKSTSGGTAALGC |
| | Fc- | | LVKDYFPEPVTVSWNSGALTSGVHTFPAVLQSSGLYSLSSVVTVP |
| | (hole, | | SSSLGTQTYICNVNHKPSNTKVDKKVEPKSCDKTHTCPPCPAPEA |
| | PG- | | AGGPSVFLFPPKPKDTLMISRTPEVTCVVVDVSHEDPEVKFNWYV |
| | LALA) | | DGVEVHNAKTKPREEQYNSTYRVVSVLTVLHQDWLNGKEYKCKVS |
| | | | NKALGAPIEKTISKAKGQPREPQVCTLPPSRDELTKNQVSLSCAV |
| | | | KGFYPSDIAVEWESNGQPENNYKTTPPVLDSDGSFFLVSKLTVDK |
| | | | SRWQQGNVFSCSVMHEALHNHYTQKSLSLSP |
| | VH-Ck | 334 | EVQLLESGGGLVQPGGSLRLSCAASGFYFTDYYMNWVRQAPGKGL |
| | | | EWLGFISNKANAYTTEYSASVKGRFTISRDKSKNTLYLQMNSLRA |
| | | | EDTATYYCTRDRGLRFYFDYWGQGTTVTVSSASVAAPSVFIFPPS |
| | | | DEQLKSGTASVVCLLNNFYPREAKVQWKVDNALQSGNSQESVTEQ |
| | | | DSKDSTYSLSSTLTLSKADYEKHKVYACEVTHQGLSSPVTKSFNR |
| | | | GEC |
| P005.102 | VL- | 335 | EIVLTQSPATLSLSPGERATLSCRASSSVTYIHWYQQKPGQAPRS |
| | CH1- | | WIYATSNLASGIPARFSGSGSGTDFTLTISSLEPEDFAVYYCQHW |
| | IgG1 | | SSKSPTFGQGTKLEIKSSASTKGPSVFPLAPSSKSTSGGTAALGC |
| | Fc- | | LVKDYFPEPVTVSWNSGALTSGVHTFPAVLQSSGLYSLSSVVTVP |
| | (hole, | | SSSLGTQTYICNVNHKPSNTKVDKKVEPKSCDKTHTCPPCPAPEA |
| | PG- | | AGGPSVFLFPPKPKDTLMISRTPEVTCVVVDVSHEDPEVKFNWYV |
| | LALA) | | DGVEVHNAKTKPREEQYNSTYRVVSVLTVLHQDWLNGKEYKCKVS |
| | | | NKALGAPIEKTISKAKGQPREPQVCTLPPSRDELTKNQVSLSCAV |
| | | | KGFYPSDIAVEWESNGQPENNYKTTPPVLDSDGSFFLVSKLTVDK |
| | | | SRWQQGNVFSCSVMHEALHNHYTQKSLSLSP |
| | VH-Ck | 336 | EVQLLESGGGLVQPGGSLRLSCAASGFTFTDYYMNWVRQAPGKGL |
| | | | EWLGFIGNKANAYTTEYSASVKGRFTISRDKSKNTLYLQMNSLRA |
| | | | EDTATYYCIRDRGIRFQFDYWGQGTTVTVSSASVAAPSVFIFPPS |
| | | | DEQLKSGTASVVCLLNNFYPREAKVQWKVDNALQSGNSQESVTEQ |
| | | | DSKDSTYSLSSTLTLSKADYEKHKVYACEVTHQGLSSPVTKSFNR |
| | | | GEC |
| P005.102 | VL- | 337 | EIVLTQSPATLSLSPGERATLSCRASSSVTYIHWYQQKPGQAPRS |
| -combo1 | CH1- | | WIYATSNLASGIPARFSGSGSGTDFTLTISSLEPEDFAVYYCQHW |
| | IgG1 | | SSKSPTFGQGTKLEIKSSASTKGPSVFPLAPSSKSTSGGTAALGC |
| | Fc-(hole, | | LVKDYFPEPVTVSWNSGALTSGVHTFPAVLQSSGLYSLSSVVTVP |
| | PG- | | SSSLGTQTYICNVNHKPSNTKVDKKVEPKSCDKTHTCPPCPAPEA |
| | LALA) | | AGGPSVFLFPPKPKDTLMISRTPEVTCVVVDVSHEDPEVKFNWYV |
| | | | DGVEVHNAKTKPREEQYNSTYRVVSVLTVLHQDWLNGKEYKCKVS |
| | | | NKALGAPIEKTISKAKGQPREPQVCTLPPSRDELTKNQVSLSCAV |
| | | | KGFYPSDIAVEWESNGQPENNYKTTPPVLDSDGSFFLVSKLTVDK |
| | | | SRWQQGNVFSCSVMHEALHNHYTQKSLSLSP |
| | VH-Ck | 338 | EVQLLESGGGLVQPGGSLRLSCAASGFYFTDYYMNWVRQAPGKGL |
| | | | EWLGVISNKANAYTTEYSASVKGRFTISRDKSKNTLYLQMNSLRA |
| | | | EDTATYYCIRDRGIRFQFDYWGQGTTVTVSSASVAAPSVFIFPPS |
| | | | DEQLKSGTASVVCLLNNFYPREAKVQWKVDNALQSGNSQESVTEQ |
| | | | DSKDSTYSLSSTLTLSKADYEKHKVYACEVTHQGLSSPVTKSFNR |
| | | | GEC |
| P005.102 | VL- | 339 | EIVLTQSPATLSLSPGERATLSCRASSSVTYIHWYQQKPGQAPRS |
| -combo2 | CH1- | | WIYATSNLASGIPARFSGSGSGTDFTLTISSLEPEDFAVYYCQHW |
| | IgG1 | | SSKSPTFGQGTKLEIKSSASTKGPSVFPLAPSSKSTSGGTAALGC |
| | Fc-(hole, | | LVKDYFPEPVTVSWNSGALTSGVHTFPAVLQSSGLYSLSSVVTVP |
| | PG- | | SSSLGTQTYICNVNHKPSNTKVDKKVEPKSCDKTHTCPPCPAPEA |
| | LALA) | | AGGPSVFLFPPKPKDTLMISRTPEVTCVVVDVSHEDPEVKFNWYV |
| | | | DGVEVHNAKTKPREEQYNSTYRVVSVLTVLHQDWLNGKEYKCKVS |
| | | | NKALGAPIEKTISKAKGQPREPQVCTLPPSRDELTKNQVSLSCAV |
| | | | KGFYPSDIAVEWESNGQPENNYKTTPPVLDSDGSFFLVSKLTVDK |
| | | | SRWQQGNVFSCSVMHEALHNHYTQKSLSLSP |
| | VH-Ck | 340 | EVQLLESGGGLVQPGGSLRLSCAASGFYFSDYYMNWVRQAPGKGL |
| | | | EWLGVISNKANAYTTEYSASVKGRFTISRDKSKNTLYLQMNSLRA |
| | | | EDTATYYCIRDRGIRFQFDYWGQGTTVTVSSASVAAPSVFIFPPS |
| | | | DEQLKSGTASVVCLLNNFYPREAKVQWKVDNALQSGNSQESVTEQ |
| | | | DSKDSTYSLSSTLTLSKADYEKHKVYACEVTHQGLSSPVTKSFNR |
| | | | GEC |
| P005.103 | VL- | 341 | EIVLTQSPATLSLSPGERATLSCRASSSVTYIHWYQQKPGQAPRS |
| -combo1 | CH1- | | WIYATSNLASGIPARFSGSGSGTDFTLTISSLEPEDFAVYYCQHW |
| | IgG1 | | SSISPTFGQGTKLEIKSSASTKGPSVFPLAPSSKSTSGGTAALGC |
| | Fc-(hole, | | LVKDYFPEPVTVSWNSGALTSGVHTFPAVLQSSGLYSLSSVVTVP |
| | PG- | | SSSLGTQTYICNVNHKPSNTKVDKKVEPKSCDKTHTCPPCPAPEA |
| | LALA) | | AGGPSVFLFPPKPKDTLMISRTPEVTCVVVDVSHEDPEVKFNWYV |
| | | | DGVEVHNAKTKPREEQYNSTYRVVSVLTVLHQDWLNGKEYKCKVS |
| | | | NKALGAPIEKTISKAKGQPREPQVCTLPPSRDELTKNQVSLSCAV |
| | | | KGFYPSDIAVEWESNGQPENNYKTTPPVLDSDGSFFLVSKLTVDK |
| | | | SRWQQGNVFSCSVMHEALHNHYTQKSLSLSP |
| | VH-Ck | 342 | EVQLLESGGGLVQPGGSLRLSCAASGFTFTDYYMNWVRQAPGKGL |
| | | | EWLGFIGNKANAYTTEYSASVKGRFTISRDKSKNTLYLQMNSLRA |
| | | | EDTATYYCTRDRGIRFSFDYWGQGTTVTVSSASVAAPSVFIFPPS |
| | | | DEQLKSGTASVVCLLNNFYPREAKVQWKVDNALQSGNSQESVTEQ |
| | | | DSKDSTYSLSSTLTLSKADYEKHKVYACEVTHQGLSSPVTKSFNR |
| | | | GEC |
| P005.103 | VL- | 343 | EIVLTQSPATLSLSPGERATLSCRASSSVTYIHWYQQKPGQAPRS |
| -combo2 | CH1- | | WIYATSNLASGIPARFSGSGSGTDFTLTISSLEPEDFAVYYCQHW |
| | IgG1 | | SSISPTFGQGTKLEIKSSASTKGPSVFPLAPSSKSTSGGTAALGC |
| | Fc- | | LVKDYFPEPVTVSWNSGALTSGVHTFPAVLQSSGLYSLSSVVTVP |
| | (hole, | | SSSLGTQTYICNVNHKPSNTKVDKKVEPKSCDKTHTCPPCPAPEA |
| | PG- | | AGGPSVFLFPPKPKDTLMISRTPEVTCVVVDVSHEDPEVKFNWYV |
| | LALA) | | DGVEVHNAKTKPREEQYNSTYRVVSVLTVLHQDWLNGKEYKCKVS |
| | | | NKALGAPIEKTISKAKGQPREPQVCTLPPSRDELTKNQVSLSCAV |
| | | | KGFYPSDIAVEWESNGQPENNYKTTPPVLDSDGSFFLVSKLTVDK |
| | | | SRWQQGNVFSCSVMHEALHNHYTQKSLSLSP |
| | VH-Ck | 344 | EVQLLESGGGLVQPGGSLRLSCAASGFYFTDYYMNWVRQAPGKGL |
| | | | EWLGVISNKANAYTTEYSASVKGRFTISRDKSKNTLYLQMNSLRA |
| | | | EDTATYYCTRDRGIRFSFDYWGQGTTVTVSSASVAAPSVFIFPPS |
| | | | DEQLKSGTASVVCLLNNFYPREAKVQWKVDNALQSGNSQESVTEQ |
| | | | DSKDSTYSLSSTLTLSKADYEKHKVYACEVTHQGLSSPVTKSFNR |
| | | | GEC |
| P006.038 | VL- | 345 | EIVLTQSPATLSLSPGERATLSCRASSSVTYIHWYQQKPGQAPRS |
| -combo1 | CH1- | | WIYATSNLASGIPARFSGSGSGTDFTLTISSLEPEDFAVYYCQHW |
| | IgG1 | | SSVPPTFGQGTKLEIKSSASTKGPSVFPLAPSSKSTSGGTAALGC |
| | Fc- | | LVKDYFPEPVTVSWNSGALTSGVHTFPAVLQSSGLYSLSSVVTVP |
| | (hole, | | SSSLGTQTYICNVNHKPSNTKVDKKVEPKSCDKTHTCPPCPAPEA |
| | PG- | | AGGPSVFLFPPKPKDTLMISRTPEVTCVVVDVSHEDPEVKFNWYV |
| | LALA) | | DGVEVHNAKTKPREEQYNSTYRVVSVLTVLHQDWLNGKEYKCKVS |
| | | | NKALGAPIEKTISKAKGQPREPQVCTLPPSRDELTKNQVSLSCAV |
| | | | KGFYPSDIAVEWESNGQPENNYKTTPPVLDSDGSFFLVSKLTVDK |
| | | | SRWQQGNVFSCSVMHEALHNHYTQKSLSLSP |
| | VH-Ck | 346 | EVQLLESGGGLVQPGGSLRLSCAASGFYFTDYAMNWVRQAPGKGL |
| | | | EWLGVISNKANAYTTEYSASVKGRFTISRDKSKNTLYLQMNSLRA |
| | | | EDTATYYCIRDRGIRFGFDYWGQGTTVTVSSASVAAPSVFIFPPS |
| | | | DEQLKSGTASVVCLLNNFYPREAKVQWKVDNALQSGNSQESVTEQ |
| | | | DSKDSTYSLSSTLTLSKADYEKHKVYACEVTHQGLSSPVTKSFNR |
| | | | GEC |
| P006.038 | VL- | 347 | EIVLTQSPATLSLSPGERATLSCRASSSVTYIHWYQQKPGQAPRS |
| -combo2 | CH1- | | WIYATSNLASGIPARFSGSGSGTDFTLTISSLEPEDFAVYYCQHW |
| | IgG1 | | SSVPPTFGQGTKLEIKSSASTKGPSVFPLAPSSKSTSGGTAALGC |
| | Fc- | | LVKDYFPEPVTVSWNSGALTSGVHTFPAVLQSSGLYSLSSVVTVP |
| | (hole, | | SSSLGTQTYICNVNHKPSNTKVDKKVEPKSCDKTHTCPPCPAPEA |
| | PG- | | AGGPSVFLFPPKPKDTLMISRTPEVTCVVVDVSHEDPEVKFNWYV |
| | LALA) | | DGVEVHNAKTKPREEQYNSTYRVVSVLTVLHQDWLNGKEYKCKVS |
| | | | NKALGAPIEKTISKAKGQPREPQVCTLPPSRDELTKNQVSLSCAV |
| | | | KGFYPSDIAVEWESNGQPENNYKTTPPVLDSDGSFFLVSKLTVDK |
| | | | SRWQQGNVFSCSVMHEALHNHYTQKSLSLSP |
| | | 348 | EVQLLESGGGLVQPGGSLRLSCAASGFTFSDYEMNWVRQAPGKGL |
| | VH-Ck | | EWLGFISNKANAYTTEYSASVKGRFTISRDKSKNTLYLQMNSLRA |
| | | | EDTATYYCIRDRGIRFGFDYWGQGTTVTVSSASVAAPSVFIFPPS |
| | | | DEQLKSGTASVVCLLNNFYPREAKVQWKVDNALQSGNSQESVTEQ |
| | | | DSKDSTYSLSSTLTLSKADYEKHKVYACEVTHQGLSSPVTKSFNR |
| | | | GEC |
| CD28 | VH- | 349 | QVQLVQSGAEVKKPGASVKVSCKASGYTFTSYYIHWVRQAPGQGL |
| (SA_ | CH1- | | EWIGSIYPGNVQTNYNEKFKDRATLTVDTSISTAYMELSRLRSDD |
| Variant | IgG1 | | TAVYFCTRSHYGLDWNFDVWGQGTTVTVSSASTKGPSVFPLAPSS |
| 15) | Fc | | KSTSGGTAALGCLVEDYFPEPVTVSWNSGALTSGVHTFPAVLQSS |
| | (knob, | | GLYSLSSVVTVPSSSLGTQTYICNVNHKPSNTKVDEKVEPKSCDK |
| | PG- | | THTCPPCPAPEAAGGPSVFLFPPKPKDTLMISRTPEVTCVVVDVS |
| | LALA) | | HEDPEVKFNWYVDGVEVHNAKTKPREEQYNSTYRVVSVLTVLHQD |
| | | | WLNGKEYKCKVSNKALGAPIEKTISKAKGQPREPQVYTLPPCRDE |
| | | | LTKNQVSLWCLVKGFYPSDIAVEWESNGQPENNYKTTPPVLDSDG |
| | | | SFFLYSKLTVDKSRWQQGNVFSCSVMHEALHNHYTQKSLSLSP |
| | VL-Ck | 350 | DIQMTQSPSSLSASVGDRVTITCHASQNIYVFLNWYQQKPGKAPK |
| | | | LLIYKASNLHTGVPSRFSGSGSGTDFTLTISSLQPEDFATYYCQQ |
| | | | GQTYPYTFGGGTKVEIKRTVAAPSVFIFPPSDRKLKSGTASVVCL |
| | | | LNNFYPREAKVQWKVDNALQSGNSQESVTEQDSKDSTYSLSSTLT |
| | | | LSKADYEKHKVYACEVTHQGLSSPVTKSFNRGEC |

### 10.3.2 Affinity Determination of Selected Antibodies by SPR

[1003] The Affinity (K_{D}) of the parental antibody A5H1EL1D as well as its affinity-matured derivatives was measured by SPR using a ProteOn XPR36 instrument (Biorad) at 25° C.

[1004] About 2000, 1000, 500, and 250 RU of biotinylated N(A2B2)A-avi-His were immobilized on 4 channels of a Streptavidin-coated NLC chip in vertical orientation. As a control for non-specific binding, 2000 RU of biotinylated NA(B2)A-avi-His protein was immobilized on channel 5. For the determination of the affinity (K_{D}) of the purified bispecific constructs, injection direction was changed to horizontal orientation. Two-fold dilution series of purified bi-specific IgGs (varying concentration ranges between 25 and 1.56 nM) were injected simultaneously at 100 μl/min along separate channels 1-5, with association times of 180s, and dissociation times of 1200s. Buffer (PBST) was injected along the sixth channel to provide an “in-line” blank for referencing. Regeneration was performed with 10 mM glycine pH 1.5 for 20s at 50 ul/min (vertical orientation).

[1005] Association rate constants (kon) and dissociation rate constants (koff) were calculated using a simple one-to-one Langmuir binding model in ProteOn Manager v3.1 software by simultaneously fitting the association and dissociation sensorgrams. The equilibrium dissociation constant (K_{D}) was calculated as the ratio koff/kon. All kinetic and thermodynamic data are listed in Table 25. Higher affinity (lower K_{D} values) were observed for the affinity-matured clones that were identified by the phage display selection. In addition, combinations with exchanged CDRs and CDR positions were tested. While some combinations (e.g. clones “P005.103-combo2” and “P005.102-combo1”) resulted in very slow off-rates and consequently very high affinities, the affinity was significantly reduced in 2 combinatorial clones (clones “P006.038-combo1” and “P006.03 8-combo2”).

TABLE 25
Determination of kinetic and thermodynamic parameters
of purified bi-specific CEA-CD28 constructs by SPR

| Clone ID | k on (1/Ms) | k off (1/s) | K_{D} (nM) |
|---|---|---|---|
| A5H1EL1D | 1.58E+5 | 3.33E−4 | 2.11 |
| P006.038 | 2.67E+5 | 5.87E−5 | 0.22 |
| P005.097 | 2.69E+5 | 8.87E−5 | 0.33 |
| P005.103 | 2.57E+5 | 1.12E−4 | 0.44 |
| P002.139 | 2.49E+5 | 9.70E−5 | 0.39 |
| P001.177 | 2.05E+5 | 8.83E−5 | 0.43 |
| P005.102 | 1.60E+5 | 3.31E−5 | 0.20 |
| P005.102-combo1 | 2.07E+5 | 1.23E−5 | 0.06 |
| P005.102-combo2 | 2.25E+5 | 1.85E−5 | 0.08 |
| P005.103-combo1 | 1.26E+5 | 3.42E−5 | 0.27 |
| P005.103-combo2 | 1.23E+5 | 1.05E−5 | 0.09 |
| P006.038-combo1 | 1.78E+5 | 7.99E−5 | 4.48 |
| P006.038-combo2 | 1.91E+5 | 6.98E−4 | 3.66 |

### Example 11

### Generation and Production of Further Bispecific Antigen Binding Molecules Targeting CD28 and Carcinoembryonic Antigen (CEA)

### 11.1 Cloning of the Bispecific Antigen Binding Molecules

[1006] For the generation of the expression plasmids, the sequences of the respective variable domains were used and sub-cloned in frame with the respective constant regions which are pre-inserted in the respective recipient mammalian expression vector. A schematic description of the resulting molecules is shown in FIG. 23. In the Fc domain, Pro329Gly, Leu234Ala and Leu235Ala mutations (PG-LALA) have been introduced in the constant region of the human IgG1 heavy chains to abrogate binding to Fc gamma receptors according to the method described in International Patent Appl. Publ. No. WO 2012/130831. For the generation of bispecific antibodies, Fc fragments contained either the “knob” (S354C/T366W mutations, numbering according to Kabat EU index) or “hole” mutations (Y349C/T366S/L368A/Y407V mutations according to Kabat EU index) to avoid mispairing of the heavy chains. In order to avoid mispairing of light chains in the bispecific antigen binding molecules, exchange of VH/VL or CH1/Ckappa domains was introduced in one binding moiety (CrossFab technology). In another binding moiety, charges were introduced into the CH1 and Ckappa domains as described in International Patent Appl. Publ. No. WO 2015/150447. The generation and preparation of anti-CEA clone T84.66 is described in WO 2016/075278 A2.

[1007] The following molecules were cloned, a schematic illustration thereof is shown in FIGS. 23A to 23D:

Molecule 11A: CEA (A5H1EL1D)-CD28 (SA) 1+1 format, bispecific huIgG1 PG-LALA CrossFab molecule with charged modifications in the CD28(SA) Fab fragment (knob) and VH/VL exchange in CEA(A5H1EL1D) Fab fragment (hole) (FIG. 23A) comprising the amino acid sequences of SEQ ID Nos: 351, 352, 353 and 354 (P1AE4773).
Molecule 11B: CEA (A5H1EL1D)-CD28 (SA_Variant 8) 1+1 format, bispecific huIgG1 PG-LALA CrossFab molecule with charged modifications in the CD28(SA_Variant 8) Fab fragment (knob) and VH/VL exchange in CEA(A5H1EL1D) Fab fragment (hole) (FIG. 23A) comprising the amino acid sequences of SEQ ID Nos: 351, 352, 355 and 356 (P1AE4774).
Molecule 11C: CEA (A5H1EL1D)-CD28 (SA_Variant 15) 1+1 format, bispecific huIgG1 PG-LALA CrossFab molecule with charged modifications in the CD28(SA_Variant 15) Fab fragment (knob) and VH/VL exchange in CEA(A5H1EL1D) Fab fragment (hole) (FIG. 23A) comprising the amino acid sequences of SEQ ID Nos: 351, 352, 357 and 358 (P1AE4775).
Molecule 11D: CEA (A5H1EL1D)-CD28 (SA_Variant 29) 1+1 format, bispecific huIgG1 PG-LALA CrossFab molecule with charged modifications in the CD28(SA_Variant 29) Fab fragment (knob) and VH/VL exchange in CEA(A5H1EL1D) Fab fragment (hole) (FIG. 23A) comprising the amino acid sequences of SEQ ID Nos: 351, 352, 359 and 354 (P1AE4776).
Molecule 11E: CEA (A5H1EL1D)-CD28 (SA) 1+1 format, bispecific huIgG1 PG-LALA CrossFab molecule with VH/VL exchange in the CD28(SA) Fab fragment (knob) and charged modifications in the CEA(A5H1EL1D) Fab fragment (hole) (FIG. 23B) comprising the amino acid sequences of SEQ ID Nos: 360, 361, 362 and 363 (P1AE4777).
Molecule 11F: CEA (A5H1EL1D)-CD28 (SA_Variant 8) 1+1 format, bispecific huIgG1 PG-LALA CrossFab molecule with VH/VL exchange in the CD28 (SA_Variant 8) Fab fragment (knob) and charged modifications in the CEA(A5H1EL1D) Fab fragment (hole) (FIG. 23B) comprising the amino acid sequences of SEQ ID Nos: 360, 361, 364 and 365 (P1AE4780).
Molecule 11G: CEA (A5H1EL1D)-CD28 (SA_Variant 15) 1+1 format, bispecific huIgG1 PG-LALA CrossFab molecule with VH/VL exchange in the CD28 (SA_Variant 15) Fab fragment (knob) and charged modifications in the CEA(A5H1EL1D) Fab fragment (hole) (FIG. 23B) comprising the amino acid sequences of SEQ ID Nos: 360, 361, 366 and 367 (P1AE4791).
Molecule 11H: CEA (A5H1EL1D)-CD28 (SA_Variant 29) 1+1 format, bispecific huIgG1 PG-LALA CrossFab molecule with VH/VL exchange in the CD28 (SA_Variant 29) Fab fragment (knob) and charged modifications in the CEA(A5H1EL1D) Fab fragment (hole) (FIG. 23B) comprising the amino acid sequences of SEQ ID Nos: 360, 361, 368 and 363 (P1AE4793).
Molecule 11I: CEA (T84.66)-CD28 (SA) 1+1 format, bispecific huIgG1 PG-LALA CrossFab molecule with charged modifications in the CD28(SA) Fab fragment (knob) and VH/VL exchange in CEA(T84.66) Fab fragment (hole) (FIG. 23A) comprising the amino acid sequences of SEQ ID Nos: 369, 370, 353 and 354 (P1AE6488).
Molecule 11J: CEA (T84.66)-CD28 (SA_Variant 29) 1+1 format, bispecific huIgG1 PG-LALA CrossFab molecule with charged modifications in the CD28(SA_Variant 29) Fab fragment (knob) and VH/VL exchange in CEA (T.84.66) Fab fragment (hole) (FIG. 23A) comprising the amino acid sequences of SEQ ID Nos: 369, 370, 359 and 354 (P1AE6495).
Molecule 11K: CEA (T84.66)-CD28 (SA_Variant 15) 1+1 format, bispecific huIgG1 PG-LALA CrossFab molecule with charged modifications in the CD28(SA_Variant 15) Fab fragment (knob) and VH/VL exchange in CEA(T84.66) Fab fragment (hole) (FIG. 23A) comprising the amino acid sequences of SEQ ID Nos: 369, 370, 357 and 358 (P1AE6557).
Molecule 11L: CEA (T84.66)-CD28 (SA_Variant 8) 1+1 format, bispecific huIgG1 PG-LALA CrossFab molecule with charged modifications in the CD28(SA_Variant 8) Fab fragment (knob) and VH/VL exchange in CEA(T84.66) Fab fragment (hole) (FIG. 23A) comprising the amino acid sequences of SEQ ID Nos: 369, 370, 355 and 356 (P1AE6556).
Molecule 11M: CEA (T84.66)-CD28 (SA_Variant 29) 1+1 format, bispecific huIgG1 PG-LALA CrossFab molecule with VH/VL exchange in the CD28(SA_Variant 29) Fab fragment (knob) and charged modifications in the CEA(T84.66) Fab fragment (hole) (FIG. 23B) comprising the amino acid sequences of SEQ ID Nos: 371, 372, 368 and 363 (P1AE9605).
Molecule 11N: CEA (T84.66)-CD28 (SA_Variant 8) 1+1 format, bispecific huIgG1 PG-LALA CrossFab molecule with VH/VL exchange in the CD28 (SA_Variant 8) Fab fragment (knob) and charged modifications in the CEA(T84.66) Fab fragment (hole) (FIG. 23B) comprising the amino acid sequences of SEQ ID Nos: 371, 372, 366 and 367 (P1AE9606).
Molecule 11O: CEA (T84.66)-CD28 (SA_Variant 15) 1+1 format, bispecific huIgG1 PG-LALA CrossFab molecule with VH/VL exchange in the CD28 (SA_Variant 15) Fab fragment (knob) and charged modifications in the CEA(T84.66) Fab fragment (hole) (FIG. 23B) comprising the amino acid sequences of SEQ ID Nos: 371, 372, 364 and 365 (P1AE9607).
Molecule 11P: CEA (A5H1EL1D)-CD28 (SA-Variant 29) 2+1, bispecific monovalent anti-CD28 (SA_Variant 29) and bivalent anti-CEA huIgG1 PG-LALA CrossFab construct, charged modifications in both anti-CEA Fab fragments fused head to tail to each other (hole), VH/VL exchange in the anti-CD28 CrossFab fragment (knob) (FIG. 23C). The molecule comprises the amino acid sequences of SEQ ID NOs: 368, 362, 361 and 373 (P1AE6924).
Molecule 11Q: CEA (A5H1EL1D)-CD28 (SA_Variant 29) 2+1, bispecific monovalent anti-CD28 (SA) and bivalent anti-CEA huIgG1 PG-LALA CrossFab construct, “classical orientation”, VH/VL exchange in the anti-CD28 CrossFab fragment, charged modification in both anti-CEA Fab fragments (FIG. 23D). The molecule comprises the amino acid sequences of SEQ ID NOs: 368, 374, 361 and 360 (P1AE6925).
Molecule 11R: CEA (P002.139)-CD28 (SA_Variant 15) 1+1 format, bispecific huIgG1 PG-LALA CrossFab molecule with charged modifications in the CD28(SA_Variant 15) Fab fragment (knob) and VH/VL exchange in CEA(P002.139) Fab fragment (hole) (FIG. 23A) comprising the amino acid sequences of SEQ ID Nos: 375, 376, 357 and 358 (P1AE8371).
Molecule 11S: CEA (P002.139)-CD28 (SA_Variant 8) 1+1 format, bispecific huIgG1 PG-LALA CrossFab molecule with charged modifications in the CD28(SA_Variant 8) Fab fragment (knob) and VH/VL exchange in CEA(P002.139) Fab fragment (hole) (FIG. 23A) comprising the amino acid sequences of SEQ ID Nos: 375, 376, 355 and 356 (P1AF1115).
Molecule 11T: CEA (P002.139)-CD28 (SA_Variant 11) 1+1 format, bispecific huIgG1 PG-LALA CrossFab molecule with charged modifications in the CD28(SA_Variant 11) Fab fragment (knob) and VH/VL exchange in CEA(P002.139) Fab fragment (hole) (FIG. 23A) comprising the amino acid sequences of SEQ ID Nos: 375, 376, 355 and 354 (P1AF1116).
For comparison the following anti-CD28 antibody variants were made:
Molecule 11U: CD28(SA_Variant 8) (PG-LALA), CD28 (SA_Variant 8) antibody in a huIgG1 PG-LALA isotype (FIG. 1B) comprises the amino acid sequences of SEQ ID NO:377 and SEQ ID NO:378 (P1AE7035).
Molecule 11V: CD28(SA_Variant 11) (PG-LALA), CD28 (SA_Variant 11) antibody in a huIgG1 PG-LALA isotype (FIG. 1B) comprises the amino acid sequences of SEQ ID NO:379 and SEQ ID NO:380 (P1AE7036).
Molecule 11W: CD28(SA_Variant 15) (PG-LALA), CD28 (SA_Variant 15) antibody in a huIgG1 PG-LALA isotype (FIG. 1B) comprises the amino acid sequences of SEQ ID NO:381 and SEQ ID NO:382 (P1AE7037).
Molecule 11X: CD28(SA_Variant 27) (PG-LALA), CD28 (SA_Variant 27) antibody in a huIgG1 PG-LALA isotype (FIG. 1B) comprises the amino acid sequences of SEQ ID NO:383 and SEQ ID NO:384 (P1AE703 8).
Molecule 11Y: CD28(SA_Variant 29) (PG-LALA), CD28 (SA_Variant 29) antibody in a huIgG1 PG-LALA isotype (FIG. 1B) comprises the amino acid sequences of SEQ ID NO:385 and SEQ ID NO:386 (P1AE7039).

### 11.2 Production of the Molecules

[1008] Expression of the above-mentioned molecules is either driven by a chimeric MPSV promoter or a CMV promoter. Polyadenylation is driven by a synthetic polyA signal sequence located at the 3′ end of the CDS. In addition, each vector contains an EBV OriP sequence for autosomal replication.

[1009] For the production of the Molecules 11A to 11D and 11I to 11T, HEK293-EBNA cells that grow in suspension were co-transfected with the respective expression vectors using polyethylenimine as a transfection reagent. Antibodies and bispecific antibodies were generated by transient transfection of HEK293 EBNA cells. Cells were centrifuged and medium replaced by pre-warmed CD CHO medium. Expression vectors were mixed in CD CHO medium, PEI was added, the solution vortexed and incubated for 10 minutes at room temperature. Afterwards, cells were mixed with the DNA/PEI solution, transferred to shake flask and incubated for 3 hours at 37° C. in an incubator with a 5% CO₂ atmosphere. After the incubation, Excell medium with supplements was added (Mammalian Cell Cultures for Biologics Manufacturing, Editors: Weichang Zhou, Anne Kantardjieff). One day after transfection supplements (Feed) were added (Mammalian Cell Cultures for Biologics Manufacturing, Editors: Weichang Zhou, Anne Kantardjieff). Cell supernatants were harvested after 7 days by centrifugation and subsequent filtration (0.2 μm filter) and purified by standard methods.

[1010] Molecules 11U, 11V, 11W, 11X, and 11Y were produced and purified by Evitria using their proprietary vector system with conventional (non-PCR based) cloning techniques and using suspension-adapted CHO K1 cells (originally received from ATCC and adapted to serum-free growth in suspension culture at Evitria). For the production, Evitria used its proprietary, animal-component free and serum-free media (eviGrow and eviMake2) and its proprietary transfection reagent (eviFect). Supernatant was harvested by centrifugation and subsequent filtration (0.2 μm filter) and purified by standard methods. Molecules 11E, 11F, 11G and 11H were produced and purified by Proteros according to their standard methods and protocols.

### 11.3 Purification of the Molecules

[1011] Proteins were purified from filtered cell culture supernatants referring to standard protocols. In brief, Fc containing proteins were purified from cell culture supernatants by Protein A-affinity chromatography (equilibration buffer: 20 mM sodium citrate, 20 mM sodium phosphate, pH 7.5; elution buffer: 20 mM sodium citrate, pH 3.0). Elution was achieved at pH 3.0 followed by immediate pH neutralization of the sample. The protein was concentrated by centrifugation (Millipore Amicon® ULTRA-15 (Art.Nr.: UFC903096), and aggregated protein was separated from monomeric protein by size exclusion chromatography in 20 mM histidine, 140 mM sodium chloride, pH 6.0.

### 11.4 Analytical Data of Bispecific Antigen Binding Molecules Targeting CD28 and Carcinoembryonic Antigen (CEA)

[1012] The concentration of purified proteins was determined by measuring the absorption at 280 nm using the mass extinction coefficient calculated on the basis of the amino acid sequence according to Pace, et al., Protein Science, 1995, 4, 2411-1423. Purity and molecular weight of the proteins were analyzed by CE-SDS in the presence and absence of a reducing agent using a LabChipGXII (Perkin Elmer). Determination of the aggregate content was performed by HPLC chromatography at 25° C. using analytical size-exclusion column (TSKgel G3000 SW XL or UP-SW3000) equilibrated in running buffer (25 mM K₂HPO₄, 125 mM NaCl, 200 mM L-Arginine Monohydrocloride, pH 6.7 or 200 mM KH₂PO₄, 250 mM KCl pH 6.2 respectively). A summary of the purification parameters of all molecules is given in Table 26.

TABLE 26
Summary of the production and purification of
CD28 antigen binding molecules 11A to 11Y

| | | | Analytical | Purity |
|---|---|---|---|---|
| | | | SEC (HMW/ | measured |
| | | Yield | Monomer/ | by CE- |
| Molecule | Description | [mg/l] | LMW) [%] | SDS [%] |
| 11A | CEA (A5H1EL1D) − | 11.4 | 0/100/0 | 97.8 |
| | CD28 (SA) 1 + 1 | | | |
| 11B | CEA (A5H1EL1D) − | 11.3 | 0/100/0 | 98.2 |
| | CD28 (SA_Variant | | | |
| | 8) 1 + 1 | | | |
| 11C | CEA (A5H1EL1D) − | 45.1 | 0/100/0 | 97.1 |
| | CD28 (SA_Variant | | | |
| | 15) 1 + 1 | | | |
| 11D | CEA (A5H1EL1D) − | 58.1 | 0/100/0 | 96.6 |
| | CD28 (SA_Variant | | | |
| | 29) 1 + 1 | | | |
| 11E | CEA (A5H1EL1D) − | N/A | 0.97/95.2/3.93 | 98.8 |
| | CD28 (SA, | | | |
| | crossed) 1 + 1 | | | |
| 11F | CEA (A5H1EL1D) − | N/A | 0.3/96.83/2.86 | 96.43 |
| | CD28 (SA_Variant | | | |
| | 8, crossed) 1 + 1 | | | |
| 11G | CEA (A5H1EL1D) − | N/A | 0.1/98.34/1.56 | 97.9 |
| | CD28 (SA_Variant | | | |
| | 15, crossed) 1 + 1 | | | |
| 11H | CEA (A5H1EL1D) − | N/A | 1.07/96.03/2.9 | 95.79 |
| | CD28 (SA_Variant | | | |
| | 29, crossed) 1 + 1 | | | |
| 11I | CEA (T84.66) − | | N/A | |
| | CD28 (SA) 1 + 1 | | | |
| 11J | CEA (T84.66) − | 25.2 | 3.33/96.14/0.53 | 97.8 |
| | CD28 (SA_Variant | | | |
| | 29) 1 + 1 | | | |
| 11K | CEA (T84.66) − | 3 | 5.19/93.06/1.75 | 96.32 |
| | CD28 (SA_Variant | | | |
| | 15) 1 + 1 | | | |
| 11L | CEA (T84.66) − | 7.8 | 5.12/95.5/1.84 | 95.5 |
| | CD28 (SA_Variant | | | |
| | 8) 1 + 1 | | | |
| 11M | CEA (T84.66) − | | N/A | |
| | CD28 (SA_variant | | | |
| | 29, crossed) 1 + 1 | | | |
| 11N | CEA (T84.66) − | | N/A | |
| | CD28 (SA_Variant | | | |
| | 15, crossed) 1 + 1 | | | |
| 11O | CEA (T84.66) − | | N/A | |
| | CD28 (SA_Variant | | | |
| | 8, crossed) 1 + 1 | | | |
| 11P | CEA (A5H1EL1D, | | N/A | |
| | head to tail) − | | | |
| | CD28 (SA_Variant | | | |
| | 29) 2 + 1 | | | |
| 11Q | CEA (A5H1EL1D) − | | N/A | |
| | CD28 (SA_variant | | | |
| | 29) 2 + 1, | | | |
| | classical | | | |
| 11R | CEA(P002.139) − | 7.27 | 044/99.56/0 | 100 |
| | CD28 (SA_Variant | | | |
| | 15) 1 + 1 | | | |
| 11S | CEA(P002.139) − | 12 | 0.57/97.68/1.75 | 99.44 |
| | CD28 (SA_Variant | | | |
| | 8) 1 + 1 | | | |
| 11T | CEA(P002.139) − | 7.25 | 0.7/96.61/2.69 | 95.1 |
| | CD28 (SA_Variant | | | |
| | 11) 1 + 1 | | | |
| 11U | CD28 | N/A | 0/98.43/1.57 | 80.2 |
| | (SA_Variant 8) | | | |
| | IgG1 PG LALA | | | |
| 11V | CD28 | N/A | 0/98.52/1.48 | 72.5 |
| | (SA_Variant 11) | | | |
| | IgG1 PG LALA | | | |
| 11W | CD28 | N/A | 1.49/97.44/1.07 | 82 |
| | (SA_Variant 15) | | | |
| | IgG1 PG LALA | | | |
| 11X | CD28 | N/A | 1.46/97.15/1.39 | 84.6 |
| | (SA_Variant 27) | | | |
| | IgG1 PG LALA | | | |
| 11Y | CD28 | N/A | 1.02/97.3 1.68 | 84.4 |
| | (SA_Variant 29) | | | |
| | IgG1 PG LALA | | | |

### 11.5 Binding Analysis of Bispecific Antigen Binding Molecules Targeting CD28 and Carcinoembryonic Antigen (CEA) by SPR

[1013] Affinity (K_{D}) to CD28 of Molecules 10A-10D, which bear the anti-CEA antibody A5H1EL1D and the anti-CD28 binder variants 8, 11, and 29 as well as the original binder CD28(SA), were measured by SPR by surface plasmon resonance using a Proteon XPR36 machine. For the immobilization of recombinant antigen (ligand), huCD28-Fc was diluted with PBST (10 mM phosphate, 150 mM sodium chloride pH 7.4, 0.005% Tween 20) to concentrations ranging from 100 to 500 nM, and then injected at 25 μl/minute at varying contact times. This resulted in immobilization levels between 500 to 3000 response units (RU) in vertical orientation.

[1014] For the determination of the affinity (K_{D}) of the purified molecules, injection direction was changed to horizontal orientation. Two-fold dilution series of purified constructs (varying concentration ranges between 100 and 6.25 nM) were injected simultaneously at 100 μl/min along separate channels 1-5, with association times of 150s, and dissociation times of 400s. Buffer (PBST) was injected along the sixth channel to provide an “in-line” blank for referencing. Regeneration was performed with 10 mM glycine pH 1.5 for 35s at 50 μl/min (vertical orientation). Association rate constants (kon) and dissociation rate constants (koff) were calculated using a simple one-to-one Langmuir binding model in ProteOn Manager v3.1 software by simultaneously fitting the association and dissociation sensorgrams. The equilibrium dissociation constant (K_{D}) was calculated as the ratio koff/kon. The kinetic and thermodynamic data are listed in Table 27.

TABLE 27
kinetic and thermodynamic analysis of anti-CD28
variants in bispecific molecules 11A to 11P

| Bispecific molecule | kₒₙ (1/(s*M) | k_{off} (1/s) | K_{D} (nM) |
|---|---|---|---|
| CEA (A5H1EL1D) − CD28 | 3.77E+5 | 2.94E−4 | 0.8 |
| (SA) 1 + 1 | | | |
| CEA (A5H1EL1D) − CD28 | 1.69E+5 | 9.80E−3 | 58 |
| (CD28(SA_Variant 8) 1 + 1 | | | |
| CEA (A5H1EL1D) − CD28 | 2.59E+5 | 2.64E−3 | 10 |
| (CD28(SA_Variant 15) 1 + 1 | | | |
| CEA (A5H1EL1D) − CD28 | 2.71E+5 | 3.24E−4 | 1.2 |
| (CD28(SA_Variant 29) 1 + 1 | | | |

### 11.6 Biochemical Characterization of the Anti-CD28 IgG Variants and Selected 1+1 Bispecific CEA-Targeted Anti-CD28 Antigen Binding Molecules

[1015] In order to characterize and compare their biochemical and biophysical properties, the following molecules were analyzed in detail: CEA-targeted anti-CD28 bispecific variants Molecules 10A-10D and anti-CD28 IgG variants Molecules 10U-10Y. The results are summarized in Tables 27 and 28.

### Hydrophobic Interaction Chromatography (HIC)

[1016] Apparent hydrophobicity was determined by injecting 20 μg of sample onto a HIC-Ether-5PW (Tosoh) column equilibrated with 25 mM Na-phosphate, 1.5 M ammonium sulfate, pH 7.0. Elution was performed with a linear gradient from 0 to 100% buffer B (25 mM Na-phosphate, pH 7.0) within 60 minutes. Retention times were compared to protein standards with known hydrophobicity. Most antibodies display a relative retention time between 0 and 0.35.

### Thermal Stability

[1017] Samples were prepared at a concentration of 1 mg/mL in 20 mM Histidine/Histidine chloride, 140 mM NaCl, pH 6.0, transferred into an optical 384-well plate by centrifugation through a 0.4 μm filter plate and covered with paraffine oil. The hydrodynamic radius was measured repeatedly by dynamic light scattering on a DynaPro Plate Reader (Wyatt) while the samples were heated with a rate of 0.05° C./min from 25° C. to 80° C.

### FcRn Affinity Chromatography

[1018] FcRn was expressed, purified and biotinylated as described by Cymer, Schlothauer et al., Bioanalysis 2017, 9(17), doi.org/10.4155/bio-2017-0109. For coupling, the prepared receptor was added to streptavidin-sepharose (GE Healthcare). The resulting FcRn-sepharose matrix was packed in a column housing. The column was equilibrated with 20 mM 2-(N-morpholine)-ethanesulfonic acid (MES), 140 mM NaCl, pH 5.5 (eluent A) at a 0.5 ml/min flow rate. 30 μg of antibody samples were diluted at a volume ratio of 1:1 with eluent A and applied to the FcRn column. The column was washed with 5 column volumes of eluent A followed by elution with a linear gradient from 20 to 100% 20 mM Tris/HCl, 140 mM NaCl, pH 8.8 (eluent B) in 35 column volumes. The analysis was performed with a column oven at 25° C. The elution profile was monitored by continuous measurement of the absorbance at 280 nm. Retention times were compared to protein standards with known affinities. Most antibodies display a relative retention time between 0 and 1.

### Heparin Affinity Chromatography

[1019] Heparin affinity was determined by injecting 30-50 μg of sample onto a TSKgel Heparin-5PW (Tosoh) column equilibrated with 50 mM Tris, pH 7.4. Elution was performed with a linear gradient from 0 to 100% buffer B (50 mM Tris, 1M NaCl, pH 7.4 mM) within 37 minutes. Retention times were compared to protein standards with known affinities.

[1020] All tested sequence variants passed all criteria and do not significantly differ from each other with regard to all tested biophysical and biochemical properties (Tables 28 and 29).

TABLE 28
Biophysical and biochemical properties of
tested anti-CD28 IgG variants 10U-10Y

| | Thermal | | | |
|---|---|---|---|---|
| | stability | Apparent | FcRn | Heparin |
| Sample | (° C.) | hydophobicity | affinity | affinity |
| CD28 (SA_Variant 8) | 79 | 0.218 | 0.17 | 0.58 |
| IgG1 PG LALA | | | | |
| CD28 (SA_Variant 11) | 78 | 0.313 | 0.21 | 0.58 |
| IgG1 PG LALA | | | | |
| CD28 (SA_Variant 15) | 79 | 0.265 | 0.25 | 0.59 |
| IgG1 PG LALA | | | | |
| CD28 (SA_Variant 27) | 78 | 0.194 | 0.28 | 0.59 |
| IgG1 PG LALA | | | | |
| CD28 (SA_Variant 29) | 78 | 0.308 | 0.37 | 0.59 |
| IgG1 PG LALA | | | | |

TABLE 29
Biophysical and biochemical properties of tested bispecific
CEA-targeted anti-CD28 variant molecules 11A-11D

| | Thermal | | | |
|---|---|---|---|---|
| | stability | Apparent | FcRn | Heparin |
| Sample | (° C.) | hydophobicity | affinity | affinity |
| CEA (A5H1EL1D) − | 70 | 0.22 | 0.21 | 0.66 |
| CD28 (SA) 1 + 1 | | | | |
| CEA (A5H1EL1D) − | 67 | 0.17 | 0.08 | 0.66 |
| CD28 (SA_Variant 8) | | | | |
| 1 + 1 | | | | |
| CEA (A5H1EL1D) − | 70 | 0.19 | 0.1 | 0.66 |
| CD28 (SA_Variant 15) | | | | |
| 1 + 1 | | | | |
| CEA (A5H1EL1D) − | 70 | 0.22 | 0.17 | 0.67 |
| CD28 (SA_Variant 29) | | | | |
| 1 + 1 | | | | |

### Example 12

### In Vitro Functional Characterization of Bispecific Antigen Binding Molecules Targeting CD28 and Carcinoembryonic Antigen (CEA)

### 12.1 Binding to CEACAM5 on CEA-Expressing MV3 Cells

[1021] To assess whether affinity-maturation of A5H1EL1D resulted in improved binding to CEACAM5, a FACS binding assay on MV3 cells, genetically modified to express CEA, was performed. As shown in FIG. 24, a CEA-CD28 bispecific antibody (Molecule 11R, P1AE8371) carrying the affinity-matured anti-CEA clone P002.139 showed superior binding (EC₅₀=4.1 nM) to CEACAM5 than the A5H1EL1D clone (Molecule 11C, P1AE4775) (EC₅₀=20.4 nM).

12.2 IL-2 Reporter Assay to Analyze In Vitro Functionality of CEA-CD28 Bispecific Antibodies in Combination with CEA-Targeted TCBs

[1022] IL-2 reporter cells (J1631, Promega) are genetically engineered Jurkat T cells that express a luciferase reporter driven by an IL-2 promoter. To assess the ability of CEA-targeted CD28 agonists to enhance TCB-mediated T cell effector function, 10000 MKN45 cells/well were incubated with 10⁵ IL-2 reporter cells (E:T ratio 10:1) with fixed concentration of CEA-TCB (5 nM) and a concentration range of CEA-CD28 bispecific antibodies (14 pM-10 nM). After 6h of incubation at 37° C., 5% CO₂, luminescence was assessed using OneGlo (E6120, Promega) according to manufacturer's instructions. Plates were read via Tecan Spark 10M Plate Reader.

[1023] The functionality of CEA-CD28 bispecific antibody carrying either the affinity-matured anti-CEA clone P002.139 (Molecule 11R, P1AE8371) or the clone A5H1EL1D (Molecule 11C, P1AE4775) was assessed using an IL-2 reporter cell assay in combination with CEA-TCB (5 nM) and in presence of CEA-expressing MKN45 cells. As shown in FIGS. 25A and 25B, improved affinity of the affinity-matured clone P002.139 translated to higher potency in costimulatory capacity as compared to the clone A5H1EL1D.

### Example 13

### In Vivo Functional Characterization of Bispecific Antigen Binding Molecules Targeting CD28 and Carcinoembryonic Antigen (CEA) in Combination with CEA TCB

[1024] 13.1 Efficacy Study with CEA-CD28 Bispecific Antigen Binding Molecules with Different CEA Antigen Binding Domains in Combination with CEA-TCB in MKN45 Xenograft in Humanized Mice

[1025] The efficacy study described herein was aimed to understand the CEA-clone dependent potency of the CEA-CD28 bispecific antigen binding molecule in combination with CEA-TCB in terms of tumor regression in fully humanized NSG mice.

[1026] Human MKN45 cells (human gastric carcinoma) were originally obtained from ATCC and after expansion deposited in the Glycart internal cell bank. Cells were cultured in DMEM containing 10% FCS at 37° C. in a water-saturated atmosphere at 5% CO₂. In vitro passage 12 was used for subcutaneous injection at a viability of 97%. 50 microliters cell suspension (1×10⁶ MKN45 cells) mixed with 50 microliters Matrigel were injected subcutaneously in the flank of anaesthetized mice with a 22G to 30G needle.

[1027] Female NSG mice, age 4-5 weeks at start of the experiment (Jackson Laboratory) were maintained under specific-pathogen-free condition with daily cycles of 12 h light/12 h darkness according to committed guidelines (GV-Solas; Felasa; TierschG). The experimental study protocol was reviewed and approved by local government (ZH225-17). After arrival, animals were maintained for one week to get accustomed to the new environment and for observation. Continuous health monitoring was carried out on a regular basis.

[1028] Female NSG mice were injected i.p. with 15 mg/kg of Busulfan followed one day later by an i.v. injection of 1×10⁵ human hematopoietic stem cells isolated from cord blood. At week 14-16 after stem cell injection mice were bled sublingual and blood was analyzed by flow cytometry for successful humanization. Efficiently engrafted mice were randomized according to their human T cell frequencies into the different treatment groups. At that time, mice were injected with tumor cells s.c. as described (FIG. 26, d0) and treated with the compounds or histidine buffer (Vehicle) when tumor size reached appr. 150 mm³ (day13). All mice were injected i.v. with 200 μl of the appropriate solution. To obtain the proper amount of compounds per 200 μl, the stock solutions (Table 30) were diluted with histidine buffer when necessary.

TABLE 30
Compositions used in the in vivo experiment

| | | Concentration |
|---|---|---|
| Compound | Formulation buffer | (mg/mL) |
| CEA-TCB | 20 mM Histidine, | 4.82 (=stock |
| | 140 mM NaCl, | solution) |
| | pH 6.0 | |
| CEA(T84.66)-CD28 | 20 mM Histidine, | 1.71 (=stock |
| (SA_Variant 15) | 140 mM NaCl, | solution) |
| | pH 6.0 | |
| CEA(A5H1EL1D)-CD28 | 20 mM Histidine, | 3.89 (=stock |
| (SA_Variant 15) | 140 mM NaCl, | solution) |
| | pH 6.0 | |

[1029] For combination therapies (Group C and D, FIG. 26) with CEA-CD28 and CEA-TCB the bispecific molecules were injected concomitant. Tumor growth was measured twice weekly using a caliper and tumor volume was calculated as followed:

Tv: (W²/2)×L (W: Width, L: Length)

[1030] Tumor growth inhibition values as a measurement of potency in vivo were calculated with a Roche internal statistical program as following:

$$TGI \text{:} \frac{100 - Av ( {T\_treatment}^{[ day \text{?}} - {T\_treatment}^{[ baseline ]} )}{AV ( {T\_Vehicle}^{[ day \text{?}} - {T\_Vehicle}^{[ base \text{?} ]} )} * 100$$

$$\text{?} \text{indicates text missing or illegible when filed}$$

[1031] The study was terminated at day 39. FIG. 27A shows the tumor growth kinetics (Mean, +SEM) as well as the individual tumor growth kinetics per group and mouse (FIGS. 27B to 27E). As described here, CEA-TCB, as a single agent induced little tumor growth inhibition. However, the combinations with both CEA-CD28 molecules showed improved tumor growth inhibition. Especially the combination of CEA-TCB with CEA-CD28 that contains the lower affinity binder for CEA (A5H1EL1D) resulted in superior tumor growth regression. As displayed in Table 31, highest TGI value (TGI: 116%) were calculated for the combination group of CEA-TCB with CEA-CD28 (huA5B7) indicating strongest anti-tumor effects. TGI means tumor growth inhibition, TGI>100 means tumor regression and TGI=100 is defined as tumor stasis.

TABLE 31
TGI at study day 39 (Vehicle as Control Group)

| Group | TGI |
|---|---|
| CEA TCB | 69 |
| CEA TCB + CEA(T84.66)-CD28 | 89 |
| (SA_Variant 15) | |
| CEA TCB + CEA(A5H1EL1D)-CD28 | 116 |
| (SA_Variant 15) | |

13.2 Efficacy Study with CEA-CD28 Bispecific Antigen Binding Molecules with Three Different CD28 Antigen Binding Domains in Combination with CEACAM5-TCB and Anti-PDL1 Antibody in BXPC3 Xenograft in Humanized Mice

[1032] This efficacy study was aimed to understand the impact of the affinity of the CD28 antigen binding domain of the CEA-CD28 molecules in combination with CEACAM5-TCB and anti-PD-L1 in terms of tumor regression and ImmunoPD patterns in fully humanized NSG mice. Three different affinity variants have been tested in the current study (Variant 8<Variant 15<Variant 29).

[1033] Human BXPC3 cells (human pancreatic cancer cell line) were originally obtained from ECACC (European Collection of Cell Culture) and after expansion deposited in the Roche Glycart internal cell bank. BXPC3 cells were cultured in RPMI containing 10% FCS (PAA Laboratories, Austria) with 1% Glutamax. The cells were cultured at 37° C. in a water-saturated atmosphere at 5% CO₂. In vitro passage 20 was used for s.c. injection at a viability >95%. 50 microliters cell suspension (1×10⁶ BXPC3 cells) mixed with 50 microliters Matrigel were injected subcutaneously in the flank of anaesthetized mice with a 22G to 30G needle.

[1034] Female NSG mice, age 4-5 weeks at start of the experiment (Jackson Laboratory) were maintained under specific-pathogen-free condition with daily cycles of 12 h light/12 h darkness according to committed guidelines (GV-Solas; Felasa; TierschG). The experimental study protocol was reviewed and approved by local government (ZH225-17). After arrival, animals were maintained for one week to get accustomed to the new environment and for observation. Continuous health monitoring was carried out on a regular basis.

[1035] Female NSG mice were injected i.p. with 15 mg/kg of Busulfan followed one day later by an i.v. injection of 1×10⁵ human hematopoietic stem cells isolated from cord blood. At week 14-16 after stem cell injection mice were bled sublingual and blood was analyzed by flow cytometry for successful humanization. Efficiently engrafted mice were randomized according to their human T cell frequencies into the different treatment groups A to F. At that time, mice were injected with tumor cells s.c. as described in FIG. 28 and treated with the compounds or Histidine buffer (Vehicle) when tumor size reached appr. 150 mm³ (day20). All mice were injected i.v. with 200 μl of the appropriate solution. To obtain the proper amount of compounds per 200 μl, the stock solutions (Table 32) were diluted with Histidine buffer when necessary.

TABLE 32
Compositions used in the in vivo experiment

| | | Concentration |
|---|---|---|
| Compound | Formulation buffer | (mg/mL) |
| CEACAM5-TCB | 20 mM Histidine, | 20.5 (=stock |
| | 140 mM NaCl, | solution) |
| | pH 6.0 | |
| anti-PD-L1 | 20 mM Histidine, | 60 (=stock |
| (Atezolizumab) | 140 mM NaCl, | solution) |
| | pH 6.0 | |
| CEA(A5H1EL1D)-CD28 | 20 mM Histidine, | 3.78 (=stock |
| (SA_Variant 8) | 140 mM NaCl, | solution) |
| | pH 6.0 | |
| CEA(A5H1EL1D)-CD28 | 20 mM Histidine, | 3.89 (=stock |
| (SA_Variant 15) | 140 mM NaCl, | solution) |
| | pH 6.0 | |
| CEA(A5H1EL1D)-CD28 | 20 mM Histidine, | 5.01 (=stock |
| (SA_Variant 29) | 140 mM NaCl, | solution) |
| | pH 6.0 | |

[1036] At termination (day 52), mice were sacrificed, tumors were removed, weighted and single cell suspensions were prepared through an enzymatic digestion with Collagenase V and DNAse for subsequent FACS-analysis. Single cells where stained for human CD45, CD3, CD8, and CD4 and analyzed at FACS BDFortessa.

[1037] FIG. 29 shows the tumor growth kinetics (Mean, +SEM) for all treatment groups, the corresponding TGI values of each treatment arm are shown in Table 33 below. As described here, CEACAM5 TCB monotherapy as well as the combination with a-PD-L1 induced little tumor growth inhibition. Only the addition of CEA-CD28 (SA_Variant 8) to the combination of CEACAM5-TCB and a-PD-L1 led to an increased tumor growth inhibition (TGI: 75%). Neither variant 15 nor variant 29 increased the anti-tumor effects. Interestingly, the Immuno-PD data (FIGS. 30A-D) of tumors from animals sacrificed at study termination, revealed that the additional tumor growth inhibition induced by CEA-CD28 variant 8 is also reflected by an increased intratumor T cell frequency. FIG. 30A shows representative dot plots of the stained tumor single cell suspensions of each treatment arm. The summary of CD3, CD8 and CD4 T cell infiltration is depicted in FIGS. 30B, 30C and 30D, respectively. No statistical differences were observed in the groups treated with CEA-CD28 (SA_Variant 15) or CEA-CD28 (SA_Variant 29) as compared the only CEACAM5-TCB or combination with a-PD-L1 in terms of T cell infiltration in the tumor. The strongest ImmunoPD effects have been detected with CEA-CD28 (SA_Variant 8).

TABLE 33
TGI at study day 52 (Vehicle as Control Group)

| Group | TGI |
|---|---|
| CEACAM5 TCB | 35 |
| CEACAM5 TCB + a-PD-L1 | 17 |
| CEACAM5 TCB + a-PD-L1 + | 75 |
| CEA(A5H1EL1D)-CD28 | |
| (SA_Variant 8) | |
| CEACAM5 TCB + a-PD-L1 + | 37 |
| CEA(A5H1EL1D)-CD28 | |
| (SA_Variant 15) | |
| CEACAM5 TCB + a-PD-L1 + | 35 |
| CEA(A5H1EL1D)-CD28 | |
| (SA_Variant 29) | |

13.3 Efficacy Study with CEA-CD28 Bispecific Antigen Binding Molecule in Combination with CEA TCB in MKN45 Xenograft in Humanized NSG Mice

[1038] The efficacy study described herein was aimed to study the combination of CEA-TCB and CEA-CD28 (SA_Variant 8) in a second human Xenograft model in terms of tumor regression and ImmunoPD patterns in fully humanized NSG mice.

[1039] Human MKN45 cells (human gastric carcinoma) were originally obtained from ATCC and after expansion deposited in the Glycart internal cell bank. Cells were cultured in DMEM containing 10% FCS at 37° C. in a water-saturated atmosphere at 5% CO₂. In vitro passage 12 was used for subcutaneous injection at a viability of >95%. 50 microliters cell suspension (1×10⁶ MKN45 cells) mixed with 50 microliters Matrigel were injected subcutaneously in the flank of anaesthetized mice with a 22G to 30G needle. Female NSG mice, age 4-5 weeks at start of the experiment (Jackson Laboratory) were maintained under specific-pathogen-free condition with daily cycles of 12 h light/12 h darkness according to committed guidelines (GV-Solas; Felasa; TierschG). The experimental study protocol was reviewed and approved by local government (ZH225-17). After arrival, animals were maintained for one week to get accustomed to the new environment and for observation. Continuous health monitoring was carried out on a regular basis.

[1040] Female NSG mice were injected i.p. with 15 mg/kg of Busulfan followed one day later by an i.v. injection of 1×10⁵ human hematopoietic stem cells isolated from cord blood. At week 14-16 after stem cell injection mice were bled sublingual and blood was analyzed by flow cytometry for successful humanization. Efficiently engrafted mice were randomized according to their human T cell frequencies into the different treatment groups. At that time, mice were injected with tumor cells s.c. as described in FIG. 31 and treated with the molecules or Histidine buffer (Vehicle) when tumor size reached appr. 150 mm³ (day13). All mice were injected i.v. with 200 μl of the appropriate solution. To obtain the proper amount of compounds per 200 μl, the stock solutions (Table 34) were diluted with Histidine buffer when necessary.

TABLE 34
Compositions used in the in vivo experiment

| | | Concentration |
|---|---|---|
| Compound | Formulation buffer | (mg/mL) |
| CEA-TCB | 20 mM Histidine, | 4.82 (=stock |
| | 140 mM NaCl, | solution) |
| | pH 6.0 | |
| CEA(A5H1EL1D)-CD28 | 20 mM Histidine, | 3.78 (=stock |
| (SA_Variant 8) | 140 mM NaCl, | solution) |
| | pH 6.0 | |

[1041] For the combination therapy (Group C, FIG. 31) constructs were injected concomitant.

[1042] Tumor growth was measured twice weekly using a caliper and tumor volume was calculated as followed:

Tv: (W²/2)×L (W: Width, L: Length)

Tumor growth inhibition (TGI) values as a measurement of potency in vivo were calculated with a Roche internal statistical program as described in Example 12.1 before.

[1043] At termination (day 48), mice were sacrificed, tumors were removed, weighted and single cell suspensions were prepared through an enzymatic digestion with Collagenase V and DNAse for subsequent FACS-analysis. Single cells were stained for human CD45 and CD3 and analyzed at FACS BDFortessa.

[1044] FIG. 32 shows the tumor growth kinetics (Mean, +SEM) for all treatment groups, the corresponding TGI values of each treatment arm are shown in Table 35 below. As described here, CEA-TCB monotherapy induced tumor growth inhibition with a TGI value of 84%. However, the combination treatment with CEA-CD28 (SA_Variant 8) led to a superior tumor growth inhibition (TGI: 101%). Furthermore, the Immuno-PD data (FIG. 3) of tumors from animals sacrificed at study termination, revealed that the strong tumor growth inhibition induced by CEA-CD28 (SA_Variant 8) in combination with CEA-TCB is also reflected by an increased intratumoral T cell frequency. FIG. 33A shows representative dot plots of the stained tumor single cell suspensions of each treatment arm. The summary of CD3+ T cell infiltration is depicted in FIG. 33B.

TABLE 35
TGI at study day 48 (Vehicle as Control Group)

| Group | TGI |
|---|---|
| CEA TCB | 84 |
| CEA TCB + CEA(A5H1EL1D)-CD28 | 10 |
| (SA_Variant 8) | |

### Example 14

### Generation and Production of Bispecific Antigen Binding Molecules Targeting CD28 and Epithelial Cell Adhesion Molecule (EpCAM), HER3, CD30 or Trophoblast Glycoprotein (TPBG)

### 14.1 Cloning of Bispecific Antigen Binding Molecules Targeting CD28 and EpCAM, HER3, CD30 or TPBG

[1045] For the generation of the expression plasmids, the sequences of the respective variable domains were used and sub-cloned in frame with the respective constant regions which are pre-inserted in the respective recipient mammalian expression vector. In the Fc domain, Pro329Gly, Leu234Ala and Leu235Ala mutations (PG-LALA) have been introduced in the constant region of the human IgG1 heavy chains to abrogate binding to Fc gamma receptors according to the method described in International Patent Appl. Publ. No. WO 2012/130831. For the generation of bispecific antibodies, Fc fragments contained either the “knob” (S354C/T366W mutations, numbering according to Kabat EU index) or “hole” mutations (Y349C/T366S/L368A/Y407V mutations according to Kabat EU index) to avoid mispairing of the heavy chains. In order to avoid mispairing of light chains in the bispecific antigen binding molecules, exchange of VH/VL or CH1/Ckappa domains was introduced in one binding moiety (CrossFab technology). In another binding moiety, charges were introduced into the CH1 and Ckappa domains as described in International Patent Appl. Publ. No. WO 2015/150447.

[1046] The generation and preparation of anti-EpCAM antibody MT201 (adecatumumab) is described in U.S. Pat. No. 7,632,925 B2. The production of the anti-HER3 antibody (lumretuzumab) is described in WO 2011/076683 A1. Anti-CD30 antibody brentuximab is disclosed in WO 02/34661 A2. The generation and preparation of anti-TPBG antibodies, e.g. FAB091, is described in WO 2017/072207 A1.

[1047] The following molecules were cloned, a schematic illustration thereof is shown in FIGS. 34A to 34D:

Molecule 14A: EpCAM (MT201)-CD28 (SA_Variant 15) 1+1 format, bispecific huIgG1 PG-LALA CrossFab molecule with VH/VL exchange in the CD28(SA_Variant 15) Fab fragment (knob) and charged modifications in the EpCAM (MT201) Fab fragment (hole) (FIG. 34A) comprising the amino acid sequences of SEQ ID Nos: 366, 367, 390 and 391 (P1AE9051).
Molecule 14B: HER3(lumretuzumab)-CD28 (SA_Variant 15) 1+1 format, bispecific huIgG1 PG-LALA CrossFab molecule with charged modifications in the CD28(SA_Variant 15) Fab fragment (knob) and VH/VL exchange in the anti-HER3 Fab fragment (hole) (FIG. 34B) comprising the amino acid sequences of SEQ ID Nos: 357, 358, 392 and 393 (P1AF0151).
Molecule 14C: CD30(brentuximab)-CD28 (SA_Variant 15) 1+1 format, bispecific huIgG1 PG-LALA CrossFab molecule with charged modifications in the CD28(SA_Variant 15) Fab fragment (knob) and VH/VL exchange in the anti-CD30 Fab fragment (hole) (FIG. 34C) comprising the amino acid sequences of SEQ ID Nos: 357, 358, 394 and 395 (P1AF1751).
Molecule 14D: TPBG(FAB091)-CD28 (SA_Variant 15) 1+1 format, bispecific huIgG1 PG-LALA CrossFab molecule with charged modifications in the CD28(SA_Variant 15) Fab fragment (knob) and VH/VL exchange in the anti-TPBG Fab fragment (hole) (FIG. 34D) comprising the amino acid sequences of SEQ ID Nos: 357, 358, 396 and 397 (P1AF1752).
14.2 Production of the Molecules Expression of the above-mentioned molecules is either driven by a chimeric MPSV promoter or a CMV promoter. Polyadenylation is driven by a synthetic polyA signal sequence located at the 3′ end of the CDS. In addition, each vector contains an EBV OriP sequence for autosomal replication.

[1048] Antibodies and bispecific antibodies were generated by transient transfection of HEK293 EBNA cells or CHO EBNA cells. Cells were centrifuged and, medium was replaced by pre-warmed CD CHO medium (Thermo Fisher, Cat No 10743029). Expression vectors were mixed in CD CHO medium, PEI (Polyethylenimine, Polysciences, Inc, Cat No 23966-1) was added, the solution vortexed and incubated for 10 minutes at room temperature. Afterwards, cells (2 Mio/ml) were mixed with the vector/PEI solution, transferred to a flask and incubated for 3 hours at 37° C. in a shaking incubator with a 5% CO₂ atmosphere. After the incubation, Excell medium with supplements (80% of total volume) was added (W. Zhou and A. Kantardjieff, Mammalian Cell Cultures for Biologics Manufacturing, DOI: 10.1007/978-3-642-54050-9; 2014). One day after transfection, supplements (Feed, 12% of total volume) were added. Cell supernatants were harvested after 7 days by centrifugation and subsequent filtration (0.2 μm filter), and proteins were purified from the harvested supernatant by standard methods as indicated below.

### 14.3 Purification of the Molecules

[1049] Proteins were purified from filtered cell culture supernatants referring to standard protocols. In brief, Fc containing proteins were purified from cell culture supernatants by Protein A-affinity chromatography (equilibration buffer: 20 mM sodium citrate, 20 mM sodium phosphate, pH 7.5; elution buffer: 20 mM sodium citrate, pH 3.0). Elution was achieved at pH 3.0 followed by immediate pH neutralization of the sample. The protein was concentrated by centrifugation (Millipore Amicon® ULTRA-15 (Art.Nr.: UFC903096), and aggregated protein was separated from monomeric protein by size exclusion chromatography in 20 mM histidine, 140 mM sodium chloride, pH 6.0.

### 14.4 Analytical Data of Bispecific CD28 Antigen Binding Molecules

[1050] The concentrations of purified proteins were determined by measuring the absorption at 280 nm using the mass extinction coefficient calculated on the basis of the amino acid sequence according to Pace, et al., Protein Science, 1995, 4, 2411-1423. Purity and molecular weight of the proteins were analyzed by CE-SDS in the presence and absence of a reducing agent using a LabChipGXII (Perkin Elmer). Determination of the aggregate content was performed by HPLC chromatography at 25° C. using analytical size-exclusion column (TSKgel G3000 SW XL or UP-SW3000) equilibrated in running buffer (25 mM K₂HPO₄, 125 mM NaCl, 200 mM L-Arginine Monohydrocloride, pH 6.7 or 200 mM KH₂PO₄, 250 mM KCl pH 6.2 respectively). A summary of the purification parameters of all molecules is given in Table 36.

TABLE 36
Summary of the production and purification of
CD28 antigen binding molecules 13A to 13D

| | | | Analytical | Purity |
|---|---|---|---|---|
| | | | SEC (HMW/ | measured |
| | | Yield | Monomer/ | by CE- |
| Molecule | Description | [mg/l] | LMW) [%] | SDS [%] |
| 14A | EPCAM (MT201) − | 34.6 | 8.28/91.72/0 | 94.24 |
| | CD28 | | | |
| | (SA_Variant 15) | | | |
| | 1 + 1 | | | |
| 14B | HER3 | 60.3 | 0.14/99.65/0.21 | 98.53 |
| | (Lumretuzumab) − | | | |
| | CD28 | | | |
| | (SA_Variant 15) | | | |
| | 1 + 1 | | | |
| 14C | CD30 | 24.4 | 0/99.45/0.5 | 94.06 |
| | (Brentuximab) − | | | |
| | CD28 | | | |
| | (SA_Variant 15) | | | |
| | 1 + 1 | | | |
| 14D | TPBG (5T4) − | 17.5 | 0/92.6/7.4 | 98.12 |
| | CD28 | | | |
| | (SA_Variant 15) | | | |
| | 1 + 1 | | | |

### Example 15

### In Vitro Functional Characterization of Bispecific Antigen Binding Molecules Targeting CD28 and EpCAM, HER3, CD30 or TPBG

### 15.1 Binding of EpCAM-CD28 to EpCAM- and CD28-Expressing Cells

[1051] The binding of EpCAM-CD28 (Molecule 14A) carrying the intermediate affinity CD28 Clone Variant 15 (P1AE9051) to EpCAM was tested using HT-29 cells (ATCC # HTB-38) and the binding to human CD28 was tested with CHO cells expressing human CD28 (parental cell line CHO-k1 ATCC # CCL-61, modified to stably overexpress human CD28).

[1052] To assess binding, cells were harvested, counted, checked for viability and re-suspended at 0.5 Mio cells/ml in FACS buffer (eBioscience, Cat No 00-4222-26). 5E4 cells were incubated in round-bottom 96-well plates for 1 h at 4° C. with increasing concentrations of the EpCAM-CD28 construct (10 pM-500 nM). Then, cells were washed twice with cold FACS buffer, incubated for further 30 min at 4° C. with PE-conjugated, goat-anti human PE (Jackson ImmunoReserach, Cat No 109-116-098), washed twice with cold FACS buffer, centrifuged and resuspended in 85 ul FACS buffer with DAPI (Roche, Cat No 10236276001) diluted 1:10000. To monitor unspecific binding interactions between constructs and cells, an anti-DP47 IgG was included as negative control. Binding was assessed by flow cytometry with a FACS Fortessa (BD, Software FACS Diva). Binding curves were obtained using GraphPadPrism7.

[1053] In vitro cell binding assays verify that the EpCAM-CD28 (P1AE9051) bispecific agonistic antibody binds to human CD28 (FIG. 35A) as well as to human EpCAM on HT-29 cells (FIG. 35B) in a concentration dependent manner. As expected, no binding was detected with the anti-DP47 IgG, indicating that the detection of binding is due to specific CD28 and EpCAM binding by the respective targeting moieties.

### 15.2 In Vitro Functional Characterization of EpCAM-CD28 Molecule Based on IL-2 Reporter Assay

[1054] To assess the ability of EpCAM-CD28 (Molecule 14A) to support anti-CD3-mediated T cell activation, IL-2 reporter cells (Promega, Ca No J1651) served as effector cells (Jurkat T cell line that expresses a luciferase reporter driven by the IL-2 promoter) and HT-29 served as tumor targets. 1E4 tumor target cells were incubated in white flat-bottom 96-well plates for 6h at 37° C. with 5E4 IL-2 reporter cells (E:T 5:1) in presence of 10 nM anti-CD3 (eBioscience #16-0037-85) alone or in combination with increasing concentrations of the EpCAM-CD28 construct (24 pM-100 nM). Prior to the measurement, plates were incubated at room temperature for 15 min, and then 100 μl of substrate (ONE-Glo solution, Promega, Ca No E6120) was added to the cells. After 10 min of incubation at room temperature in the dark, luminescence (counts/sec) was measured with a Tecan Spark 10M.

[1055] T cell activation in combination with a constant, suboptimal anti-CD3 stimulus was assessed. To this end, IL-2 reporter Jurkat cells were co-cultured with EpCAM-expressing HT29 cells for 6h in presence of increasing concentrations of EpCAM-CD28 (P1AE9051) and fixed, limiting concentration of anti-CD3 IgG clone OKT3 (10 nM). As depicted in FIG. 35C, EpCAM-CD28 was able to enhance T cell activation, as judged by increased IL-2 production in T cells exposed to suboptimal CD3 stimulation in a concentration dependent manner.

### 15.3 Binding of HER3-CD28 to HER3- and CD28-Expressing Cells

[1056] The binding of HER3-CD28 (Molecule 14B) carrying the intermediate affinity CD28 clone Variant 15 (P1AF0151) to HER3 was tested using T-47D cells (ATCC # HTB-133) and the binding to human CD28 was tested with CHO cells expressing human CD28 (parental cell line CHO-k1 ATCC # CCL-61, modified to stably overexpress human CD28).

[1057] To assess binding, cells were harvested, counted, checked for viability and re-suspended at 0.5 Mio cells/ml in FACS buffer (eBioscience, Cat No 00-4222-26). 5E4 cells were incubated in round-bottom 96-well plates for 1 h at 4° C. with increasing concentrations of the HER3-CD28 construct (10 pM-500 nM). Then, cells were washed twice with cold FACS buffer, incubated for further 30 min at 4° C. with PE-conjugated, goat-anti human PE (Jackson ImmunoReserach, Cat No 109-116-098), washed twice with cold FACS buffer, centrifuged and resuspended in 85 ul FACS buffer with DAPI (Roche, Cat No 10236276001) diluted 1:10000. To monitor unspecific binding interactions between constructs and cells, an anti-DP47 IgG was included as negative control. Binding was assessed by flow cytometry with a FACS Fortessa (BD, Software FACS Diva). Binding curves were obtained using GraphPadPrism7.

[1058] FACS Analysis

[1059] To assess the relative level of HER3 at the surface of T-47D, 2E5 cells were centrifuged at 480×g for 5 min and washed with PBS. Surface staining for HER3 (APC anti human, BioLegend #324708) was performed according to the supplier's indications. Cells were washed once with 150 ul/well of PBS and resuspended in 150 μl/well of PBS and analyzed using BD FACS Fortessa.

[1060] In vitro cell binding assays verify that the HER3-CD28 (Molecule 14B) bispecific agonistic antibody binds to human CD28 (FIG. 36A) as well as human HER3 (FIG. 36B) on cells in a concentration dependent manner. As expected, no binding was detected with the anti-DP47 IgG, indicating that the detection of binding is due to specific CD28 and HER3 binding by the respective targeting moieties.

### 15.4 In Vitro Functional Characterization of HER3-CD28 Molecule Based on IL-2 Reporter Assay

[1061] To assess the ability of HER3-CD28 (Molecule 14B) to support anti-CD3-mediated T cell activation, IL-2 reporter cells (Promega, Ca No J1651) served as effector cells (Jurkat T cell line that expresses a luciferase reporter driven by the IL-2 promoter) and T-47D served as tumor targets. 1E4 tumor target cells were incubated in white flat-bottom 96-well plates for 6h at 37° C. with 5E4 IL-2 reporter cells (E:T 5:1) in presence of 10 nM anti-CD3 (eBioscience #16-0037-85) alone or in combination with increasing concentrations of the HER3-CD28 construct (24 pM-100 nM). Prior to the measurement, plates were incubated at room temperature for 15 min, and then 100 ul of substrate (ONE-Glo solution, Promega, Ca No E6120) was added to the cells. After 10 min of incubation at room temperature in the dark, luminescence (counts/sec) was measured with a Tecan Spark 10M.

[1062] T cell activation in combination with a constant, suboptimal anti-CD3 stimulus was assessed. To this end, IL-2 reporter Jurkat cells were co-cultured with EpCAM-expressing HT29 cells for 6h in presence of increasing concentrations of HER3-CD28 (P1AF0151) and fixed, limiting concentration of anti-CD3 IgG clone OKT3 (10 nM). As depicted in FIG. 36C, EpCAM-CD28 was able to enhance T cell activation, i.e. IL-2 production in T cells exposed to suboptimal CD3 stimulation in a concentration dependent manner.

### 15.5 In Vitro Functional Characterization of TPBG-CD28 and CD30-CD28 Agonistic Antibodies in a PBMC Assay

[1063] The ability of TPBG(5T4)-CD28 (Molecule 14D) and CD30-CD28 (Molecule 14C) to enhance T cell activation mediated by anti-CD3 stimulation will be assessed with primary PBMC T cells from healthy donors as effector cells and 5T4-expressing target cells such as JIMT-1, NCI-H1975, NCI-N87, and Calu-1 cells, or CD30-expressing target cells such as KARPAS-299, respectively. In such an assay, 1E4 tumor target cells will be incubated in round bottom 96-well plates for 5 days at 37° C. with 1E5 (E:T 10:1) in presence of suboptimal concentration of anti-CD3 (eBioscience #16-0037-85, clone OKT3) alone or in combination with increasing concentrations of the CD28 agonistic constructs (24 pM-100 nM). Functionality of the CD28-targeted molecules will be assessed by flow cytometry, measuring T cell activation markers (CD25, CD69) and T cell proliferation (CFSE dilution).

### Example 16

### Generation and Production of Bispecific Antigen Binding Molecules Targeting CD28 and a Multiple Myeloma (MM) Cell Surface Antigen

### 16.1 Cloning of Bispecific Antigen Binding Molecules Targeting CD28 and a Multiple Myeloma (MM) Cell Surface Antigen

[1064] For the generation of the expression plasmids, the sequences of the respective variable domains were used and sub-cloned in frame with the respective constant regions which are pre-inserted in the respective recipient mammalian expression vector. In the Fc domain, Pro329Gly, Leu234Ala and Leu235Ala mutations (PG-LALA) have been introduced in the constant region of the human IgG1 heavy chains to abrogate binding to Fc gamma receptors according to the method described in International Patent Appl. Publ. No. WO 2012/130831. For the generation of bispecific antibodies, Fc fragments contained either the “knob” (S354C/T366W mutations, numbering according to Kabat EU index) or “hole” mutations (Y349C/T366S/L368A/Y407V mutations according to Kabat EU index) to avoid mispairing of the heavy chains. In order to avoid mispairing of light chains in the bispecific antigen binding molecules, exchange of VH/VL or CH1/Ckappa domains was introduced in one binding moiety (CrossFab technology). In another binding moiety, charges were introduced into the CH1 and Ckappa domains as described in International Patent Appl. Publ. No. WO 2015/150447.

[1065] Anti-GPRC5D antibody 5E11 is a humanized version of clone 5E11 as described in WO 2019/154890 A1. Anti-CD38 antibodies, e.g. daratumumab, are disclosed in WO 2006/99875 A1. The generation and preparation of anti-BCMA antibodies is described in WO 2016/166629 A1.

[1066] The following molecules were cloned, a schematic illustration thereof is shown in FIGS. 37A to 37C:

Molecule 16A: GPRC5D (5E11)-CD28 (SA_Variant 15) 1+1 format, bispecific huIgG1 PG-LALA CrossFab molecule with VH/VL exchange in the CD28(SA_Variant 15) Fab fragment (knob) and charged modifications in the GPRC5D (5E11) Fab fragment (hole) (FIG. 37A) comprising the amino acid sequences of SEQ ID Nos: 366, 367, 398 and 399 (P1AF1272).
Molecule 16B: GPRC5D (5E11)-CD28 (SA_Variant 8) 1+1 format, bispecific huIgG1 PG-LALA CrossFab molecule with charged modifications in the CD28(SA_Variant 15) Fab fragment (knob) and VH/VL exchange in the GPRC5D (5E11) Fab fragment (hole) (FIG. 37A) comprising the amino acid sequences of SEQ ID Nos: 364, 365, 398 and 399 (P1AF2954).
Molecule 16C: CD38 (Daratumumab)-CD28 (SA_Variant 15) 1+1 format, bispecific huIgG1 PG-LALA CrossFab molecule with charged modifications in the CD28(SA_Variant 15) Fab fragment (knob) and VH/VL exchange in the anti-CD38 Fab fragment (hole) (FIG. 37B) comprising the amino acid sequences of SEQ ID Nos: 357, 358, 400 and 401 (P1AE9038).
Molecule 16D: anti-BCMA-CD28 (SA_Variant 15) 1+1 format, bispecific huIgG1 PG-LALA CrossFab molecule with VH/VL exchange in the CD28(SA_Variant 15) Fab fragment (knob) and charged modifications in the anti-BCMA Fab fragment (hole) (FIG. 34A) comprising the amino acid sequences of SEQ ID Nos: 366, 367, 402 and 403 (P1AE9053).

### 16.2 Production of the Molecules

[1067] Expression of the above-mentioned molecules is either driven by a chimeric MPSV promoter or a CMV promoter. Polyadenylation is driven by a synthetic polyA signal sequence located at the 3′ end of the CDS. In addition, each vector contains an EBV OriP sequence for autosomal replication.

[1068] Antibodies and bispecific antibodies were generated by transient transfection of HEK293 EBNA cells or CHO EBNA cells. Cells were centrifuged and, medium was replaced by pre-warmed CD CHO medium (Thermo Fisher, Cat No 10743029). Expression vectors were mixed in CD CHO medium, PEI (Polyethylenimine, Polysciences, Inc, Cat No 23966-1) was added, the solution vortexed and incubated for 10 minutes at room temperature. Afterwards, cells (2 Mio/ml) were mixed with the vector/PEI solution, transferred to a flask and incubated for 3 hours at 37° C. in a shaking incubator with a 5% CO₂ atmosphere. After the incubation, Excell medium with supplements (80% of total volume) was added (W. Zhou and A. Kantardjieff, Mammalian Cell Cultures for Biologics Manufacturing, DOI: 10.1007/978-3-642-54050-9; 2014). One day after transfection, supplements (Feed, 12% of total volume) were added. Cell supernatants were harvested after 7 days by centrifugation and subsequent filtration (0.2 μm filter), and proteins were purified from the harvested supernatant by standard methods as indicated below.

[1069] Alternatively, the antibodies and bispecific antibodies described herein were prepared by Evitria using their proprietary vector system with conventional (non-PCR based) cloning techniques and using suspension-adapted CHO K1 cells (originally received from ATCC and adapted to serum-free growth in suspension culture at Evitria). For the production, Evitria used its proprietary, animal-component free and serum-free media (eviGrow and eviMake2) and its proprietary transfection reagent (eviFect). Supernatant was harvested by centrifugation and subsequent filtration (0.2 μm filter) and, proteins were purified from the harvested supernatant by standard methods

### 16.3 Purification of the Molecules

[1070] Proteins were purified from filtered cell culture supernatants referring to standard protocols. In brief, Fc containing proteins were purified from cell culture supernatants by Protein A-affinity chromatography (equilibration buffer: 20 mM sodium citrate, 20 mM sodium phosphate, pH 7.5; elution buffer: 20 mM sodium citrate, pH 3.0). Elution was achieved at pH 3.0 followed by immediate pH neutralization of the sample. The protein was concentrated by centrifugation (Millipore Amicon® ULTRA-15 (Art.Nr.: UFC903096), and aggregated protein was separated from monomeric protein by size exclusion chromatography in 20 mM histidine, 140 mM sodium chloride, pH 6.0.

### 16.4 Analytical Data of Bispecific CD28 Antigen Binding Molecules

[1071] The concentrations of purified proteins were determined by measuring the absorption at 280 nm using the mass extinction coefficient calculated on the basis of the amino acid sequence according to Pace, et al., Protein Science, 1995, 4, 2411-1423. Purity and molecular weight of the proteins were analyzed by CE-SDS in the presence and absence of a reducing agent using a LabChipGXII or LabChip GX Touch (Perkin Elmer). Determination of the aggregate content was performed by HPLC chromatography at 25° C. using analytical size-exclusion column (TSKgel G3000 SW XL or UP-SW3000) equilibrated in running buffer (25 mM K₂HPO₄, 125 mM NaCl, 200 mM L-Arginine Monohydrocloride, pH 6.7 or 200 mM KH₂PO₄, 250 mM KCl pH 6.2 respectively). A summary of the purification parameters of the molecules is given in Table 37.

TABLE 37
Summary of the production and purification of
CD28 antigen binding molecules 16A to 16D

| | | | Analytical | Purity |
|---|---|---|---|---|
| | | | SEC (HMW/ | measured |
| | | Yield | Monomer/ | by CE- |
| Molecule | Description | [mg/l] | LMW) [%] | SDS [%] |
| 16A | GPRC5D (5E11) − | 46.89 | 0.73/97.68/1.59 | 93.44 |
| | CD28 | | | |
| | (SA_Variant | | | |
| | 15) 1 + 1 | | | |
| 16B | GPRC5D (5E11) − | 89.84 | 2.99/95.26/1.75 | 88.76 |
| | CD28 | | | |
| | (SA_Variant | | | |
| | 8) 1 + 1 | | | |
| 16C | CD38 | 56.55 | 0.29/99.71/0 | 93.96 |
| | (Daratumumab) − | | | |
| | CD28 | | | |
| | (SA_Variant | | | |
| | 15) 1 + 1 | | | |
| 16D | BCMA − CD28 | 87.6 | 1.75/98.25/0 | 94.33 |
| | (SA_Variant | | | |
| | 15) 1 + 1 | | | |

### Example 17

### In Vitro Functional Characterization of Bispecific Antigen Binding Molecules Targeting CD28 and a Multiple Myeloma (MM) Cell Surface Antigen

### 17.1 Binding of Bispecific Antigen Binding Molecules Targeting CD28 and a Multiple Myeloma (MM) Cell Surface Antigen to Cells, Over-Expressing the Indicated Target

[1072] To measure the binding to GPRC5D, BCMA, CD38 or CD28 we performed FACS-based binding assay on reported multiple myeloma cell lines (Lombardi et al., Molecular characterization of human multiple myeloma cell lines by integrative genomics: insights into the biology of the disease; Genes Chromosomes Cancer. 2007, 46(3), 226-38) or CHO transfectants, that were transduced to stably overexpress either human GPRC5D or human CD28: binding to BCMA was assessed, using IM-9 cells (ATCC® CCL-159), binding to CD38 was assessed, using OCI-Ly18 cells (DSMZ ACC 699), binding to GPRC5D was assessed, using CHO-hGPRC5D cells and binding to CD28 was assessed using CHO-hCD28 cells.

[1073] IM-9 and OCI-Ly18 were cultured according to the manufacturers' instructions, the stable CHO transfectants (parental cell line CHO-k1 ATCC # CCL-61) were cultured in F-12K, supplemented with 10% FCS. Briefly, suspension cells were harvested, counted and checked for viability. Adherent CHO cells were detached using Cell Dissociation Buffer (Gibco), counted and checked for viability. All subsequent steps were performed at 4° C.

[1074] Cells were washed in FACS buffer once (PBS, 2% Fetal Bovine Serum; 1% 0.5m EDTA pH 8; 0.25% NaN₃ Sodium azide) and re-suspended in FACS buffer at 1 Mio cells per ml. 0.1 Mio cells were plated per well of a round-bottom 96-well-plate, washed with FACS buffer once more and supernatants were discarded. Cells were stained in a total volume of 50 ul per well and increasing concentrations of the indicated CD28 bispecific molecules (0.07-300 nM) for 30 minutes at 4° C. Cells were washed twice with FACS buffer and incubated for 30 min at 4° C. in a total of 25 ul per well, containing the pre-diluted secondary antibody (Alexa Fluor 488-AffiniPure F(ab′)2 Fragment Goat Anti-Human IgG, Fcγ Fragment Specific (Jackson Immunoresearch, 109-546-008, diluted 1:100 in FACS buffer, respective 109-606-008 PE, Jackson Immunoresearch, diluted 1:100 in FACS buffer, as indicated). Cells were washed twice and analyzed on a BD Fortessa flow cytometer, equipped with the software FACS Diva. Binding curves and EC₅₀ values were obtained using GraphPadPrism6.

[1075] FIGS. 38A to 38F show that all bispecific CD28 molecules are able to bind both, human CD28 (A), as well as the respective second target, namely human CD38, human BCMA or human GPRC5D in a concentration-dependent manner. Briefly, the GPRC5D-CD28 molecule has the lowest EC₅₀ for binding to human CD28 (Table 37), but reaches lower maximal binding as compared to the other two CD28 bispecific molecules.

[1076] Both, CD38- and BCMA-targeted CD28 molecules show concentration-dependent binding to CD38 and BCMA respectively, and reach saturation in the evaluated concentration range (EC₅₀ binding values are summarized in Table 38). In contrast, the GPRC5D-CD28 molecule is binding in a concentration-dependent manner, but does not reach saturation in the same concentration range, indicating a lower affinity of the GPRC5D versus the CD38 or BCMA binder, included in these molecules.

TABLE 38
EC50 values (nM) for binding of the indicated bispecific
CD28 molecules to either human CD28 or the respective
MM target antigens, expressed on cells

| | EC₅₀ Binding | EC₅₀ Binding to |
|---|---|---|
| | to CD28 | CD38/BCMA/GPRC5D |
| Molecule | (nM) | (nM) |
| CD38-CD28 | 26.8 | 4.3 |
| BCMA-CD28 | 9.9 | 3.96 |
| GPRC5D-CD28 | 4.7-5.2 | not calculated |
| (SA_variant 15) | | |
| GPRC5D-CD28 | 74.2 | not calculated |
| (SA_variant 8) | | |

### 17.2 In Vitro Functional Characterization Based on IL-2 Reporter Assay (Functional Characterization of T-Cell Activation)

[1077] To assess the ability of CD38-CD28, BCMA-CD28 and GPRC5D-CD28 bispecific antigen binding molecules to support TCB-mediated T cell activation, IL-2 reporter cells (Promega, Ca No J1651) were used as effector cells (Jurkat T cell line that expresses a luciferase reporter driven by the IL-2 promoter) and NCI-H929 cells, being positive for CD38, BCMA, as well as GPRC5D as tumor targets.

[1078] Briefly, 5×10³ tumor target cells were incubated in white flat-bottom 384-well plates (353988 Falcon™ 384-Well Flat-Bottom Tissue Culture Treated Microplate) for 5h, respective 22h at 37° C. with 2.5×10⁴ IL-2 reporter cells (E:T 5:1) in presence of 1 nM GPRC5D-TCB alone or in combination with increasing concentrations of the CD28 bispecific molecules (12.2-50 nM). Prior to the measurement, plates were incubated at room temperature for 15 min, and then 20 ul of substrate (ONE-Glo solution, Promega, Cat No E6120) was added to the cells. After 10 min of incubation at room temperature in the dark, Luminescence (counts/sec) was measured with a Tecan Spark 10M.

[1079] As depicted in FIGS. 39A to 39F, none of the MM-targeted CD28 molecules induces IL2 Jurkat reporter cell activation in the absence of a TCB signal (bright grey line, FIG. 39A-39F). As expected, with these IL-2 reporter cells, there is also no significant induction of reporter cell activation in the presence of 1 nM GPRC5D TCB, neither at the early timepoint (5h), nor at the later timepoint (after 22h).

[1080] However, all MM-targeted molecules are able to induce significant, concentration- and time-dependent activation of IL-2 reporter cells in presence of 1 nM GPRC5D-TCB. While CD38-CD28 and BCMA-CD28 molecules are able to induce L2-reporter cell activation already after 5h (FIGS. 39A and 39C), GPRC5D-CD28 reaches similar maximal levels of activation only at the later timepoint assessed (22h, FIG. 39F), indicating different kinetics of activity.

[1081] The anti-GPRC5D/anti-CD3 bispecific antibody (GPRC5D TCB, FIG. 37D) used in the experiments has been prepared in analogy to CEACAM5 TCB as described in Example 8 and in WO 2016/079076 A1. GPRC5D TCB comprises the amino acid sequences of SEQ ID NO:398, SEQ ID NO:399, SEQ ID NO:404 and SEQ ID NO:405.

### 17.3 T-Cell Mediated Lysis of Multiple Myeloma Cell Line

[1082] To assess the ability of CD38-CD28, BCMA-CD28 and GPRC5D-CD28 to boost GPRC5D TCB-mediated lysis of a Multiple Myeloma Cell line, 1.5×10⁵ human pan T effector cells were incubated with 3×10⁴ NCI-H929 target cells at a final E:T ratio of 1:1 for roughly 22h. Pan T cells were isolated from PBMCs by MACS, using the Pan T cell isolation Kit (Miltenyi Biotec, Cat No 130-096-535) according to the manufacturer's instructions. GPRC5D TCB was added at increasing concentrations (0.064 pM-1 nM), the different MM-targeted bispecific CD28 antigen binding molecules were added at a fixed concentration of 0.2 nM. Tumor Cell Lysis was assessed as follows: Assay plates were centrifuged for 5 minutes and 50 ul supernatant per well were transferred into a new 96-flat-bottom-well plate. For normalization, maximal lysis of the target cells (=100%) was induced by incubation of the target cells with a final concentration of 1% Triton X-100. Minimal lysis (=0%) refers to target cells co-incubated with effector cells, but without any bispecific construct or TCB. After an overnight incubation of roughly 22 h at 37° C., 5% CO₂, LDH release of apoptotic/necrotic target cells into the supernatant was measured using the LDH detection kit (Roche Applied Science, #11 644 793 001), according to the manufacturer's instructions.

[1083] As illustrated in FIGS. 40a to 40C, the GPRC5D TCB induces concentration-dependent lysis of NCI-H929 cells. All three evaluated MM-targeted bispecific CD28 antigen binding molecules are able to significantly boost efficacy compared to the TCB monotherapy, when administered at a fixed concentration of 0.2 nM. Furthermore, none of the MM-targeted bispecific CD28 antigen binding molecules is inducing tumor cell lysis in the absence of the TCB, which supports the dependency of the MM-targeted molecules on the TCB signal.

[1084] Table 39 summarizes the EC₅₀ values, as well as area under the curve derived from the data shown in FIGS. 40A-40C. EC₅₀ values were calculated using GraphPadPrism6.

TABLE 39
EC50 values (nM) of anti-GPRC5D TCB mediated killing

| | GPRC5D | +CD38- | +BCMA- | +GPRC5D- |
|---|---|---|---|---|
| | TCB | CD28 | CD28 | CD28 |
| EC₅₀ | 1.86 | 3.1 | 3.7 | 3.3 |
| lysis after | | | | |
| 22 h (pM) | | | | |
| Area under | 21.3 | 44.8 | 46.3 | 46.8 |
| the curve | | | | |

### Example 18

### Generation and Production of Bispecific Antigen Binding Molecules Targeting CD28 and CD19 or CD79b

### 18.1 Cloning of Bispecific Antigen Binding Molecules Targeting CD28 and CD19 or CD79b

[1085] The generation and preparation of CD19 antibodies is disclosed in WO 2017/55541 A1 or WO 2017/55328 A1. In particular, the CD19 clone 2B11 is described in WO 2017/55328 A1, which is incorporated herein by reference. The CD79b clone huMA79b.v28 (corresponding to polatuzumab) as used herein is described in WO 2009/012268 A. For the generation of the respective expression plasmids, the sequences of the respective variable domains were used and sub-cloned in frame with the respective constant regions which are pre-inserted in the respective recipient mammalian expression vector. A schematic description of the resulting molecules is shown in FIGS. 41A and 41B, respectively. Pro329Gly, Leu234Ala and Leu235Ala mutations (PG-LALA) have been introduced in the constant region of the human IgG1 heavy chains to abrogate binding to Fc gamma receptors. For the generation of unsymmetric bispecific antibodies, Fc-fragments contained either the “knob” or “hole” mutations to avoid mispairing of the heavy chains. In order to avoid mispairing of light chains in bi- and multispecific antibody constructs, exchange of VH/VL or CH1/Ckappa domains was introduced in one binding moiety (CrossFab technology). In another binding moiety, charges were introduced into the CH1 and Ckappa domains.

[1086] The following molecules were cloned, a schematic illustration thereof is shown in FIGS. 41A and 41B:

Molecule 18A: CD19 (8B8-2B11)-CD28 (SA v29) 1+1, bispecific huIgG1 PG-LALA CrossFab molecule with charge modifications in the CD28 v29 Fab (knob) and VH/VL exchange in the CD19 (2B11) Fab (hole) (FIG. 41A). The molecule comprises the heavy chain amino acid sequences of SEQ ID NOs: 118 and 430 and the light chain amino acid sequences of SEQ ID NOs:65 and 431 (P1AE8002).
Molecule 18B: CD19 (8B8-2B11)-CD28 (SA v15) 1+1, bispecific huIgG1 PG-LALA CrossFab molecule with charge modifications in the CD28 v15 Fab (knob) and VH/VL exchange in the CD19 (2B11) Fab (hole) (FIG. 41A). The molecule comprises the heavy chain amino acid sequences of SEQ ID NOs: 116 and 430 and the light chain amino acid sequences of SEQ ID NOs:121 and 431 (P1AE9040).
Molecule 18C: CD19 (8B8-2B11)-CD28 (SA v8) 1+1, bispecific huIgG1 PG-LALA CrossFab molecule with charge modifications in the CD28 v8 Fab (knob) and VH/VL exchange in the CD19 (2B11) Fab (hole) (FIG. 41A). The molecule comprises the heavy chain amino acid sequences of SEQ ID NOs: 114 and 430 and the light chain amino acid sequences of SEQ ID NOs:122 and 431 (P1AF0175).
Molecule D: CD19 (8B8-2B11)-CD28 (SA v11) 1+1, bispecific huIgG1 PG-LALA CrossFab molecule with charge modifications in the CD28 v11 Fab (knob) and VH/VL exchange in the CD19 (2B11) Fab (hole) (FIG. 2B). The molecule comprises the heavy chain amino acid sequences of SEQ ID NOs: 114 and 430 and the light chain amino acid sequences of SEQ ID NOs:65 and 431 (P1AF0377).
Molecule E: CD19 (8B8-2B11)-CD28 (SA v27) 1+1, bispecific huIgG1 PG-LALA CrossFab molecule with charge modifications in the CD28 v27 Fab (knob) and VH/VL exchange in the CD19 (2B11) Fab (hole) (FIG. 2B). The molecule comprises the heavy chain amino acid sequences of SEQ ID NOs: 118 and 430 and the light chain amino acid sequences of SEQ ID NOs:123 and 431 (P1AF0378).
Molecule F: CD79b (huMA79b.v28)-CD28 (SA v15) 1+1, bispecific huIgG1 PG-LALA CrossFab molecule with charge modifications in the CD28 v15 Fab (knob) and VH/VL exchange in the CD79b (huMA79b.v28) Fab (hole) (FIG. 2C). The molecule comprises the heavy chain amino acid sequences of SEQ ID NOs: 116 and 432 and the light chain amino acid sequences of SEQ ID NOs:121 and 433 (P1AE9039).

### 18.2 Production of Bispecific Antigen Binding Molecules Targeting CD28 and CD19 or CD79b

[1087] Expression of the above-mentioned molecules is driven by a CMV promoter. Polyadenylation is driven by a synthetic polyA signal sequence located at the 3′ end of the CDS. In addition, each vector contains an EBV OriP sequence for autosomal replication.

[1088] For the production of all constructs, HEK293-EBNA cells that grow in suspension were transiently co-transfected with the respective expression vectors using polyethylenimine as a transfection reagent. Cells were centrifuged and medium replaced by pre-warmed CD CHO medium. Expression vectors were mixed in CD CHO medium, PEI was added, the solution vortexed and incubated for 10 minutes at room temperature. Afterwards, cells were mixed with the DNA/PEI solution, transferred to shake flask and incubated for 3 hours at 37° C. in an incubator with a 5% CO₂ atmosphere. After the incubation, Excell medium with supplements was added (Mammalian Cell Cultures for Biologics Manufacturing, Editors: Weichang Zhou, Anne Kantardjieff). One day after transfection, supplements (Feed) were added (Mammalian Cell Cultures for Biologics Manufacturing, Editors: Weichang Zhou, Anne Kantardjieff). Cell supernatants were harvested after 7 days by centrifugation and subsequent filtration (0.2 μm filter) and purified by standard methods.

### 18.3 Purification of Bispecific Antigen Binding Molecules Targeting CD28 and CD19 or CD79b

[1089] Proteins were purified from filtered cell culture supernatants referring to standard protocols. In brief, Fc containing proteins were purified from cell culture supernatants by Protein A-affinity chromatography (equilibration buffer: 20 mM sodium citrate, 20 mM sodium phosphate, pH 7.5; elution buffer: 20 mM sodium citrate, pH 3.0). Elution was achieved at pH 3.0 followed by immediate pH neutralization of the sample. The protein was concentrated by centrifugation (Millipore Amicon® ULTRA-15 (Art.Nr.: UFC903096), and aggregated protein was separated from monomeric protein by size exclusion chromatography in 20 mM histidine, 140 mM sodium chloride, pH 6.0.

### 18.4 Analytical Data of Bispecific or Trispecific Antibodies Targeting CD28 and CD19 or CD79b

[1090] The protein concentration of purified constructs was determined by measuring the optical density (OD) at 280 nm, using the mass extinction coefficient calculated on the basis of the amino acid sequence according to Pace, et al., Protein Science, 1995, 4, 2411-1423. Purity and molecular weight of the proteins were analyzed by CE-SDS in the presence and absence of a reducing agent using a LabChipGXII (Perkin Elmer). Determination of the aggregate content was performed by HPLC chromatography at 25° C. using analytical size-exclusion column (TSKgel G3000 SW XL or UP-SW3000) equilibrated in running buffer (25 mM K₂HPO₄, 125 mM NaCl, 200 mM L-Arginine Monohydrocloride, pH 6.7 or 200 mM KH₂PO₄, 250 mM KCl pH 6.2 respectively). A summary of the purification parameters of all molecules is given in Table 40.

TABLE 40
Summary of the production and purification of
bispecific CD28 antigen binding molecules

| | | | Analytical | Purity |
|---|---|---|---|---|
| | | | SEC (HMW/ | measured |
| | | Yield | Monomer/ | by CE- |
| Molecule | Description | [mg/l] | LMW) [%] | SDS [%] |
| 18A | CD19 (2B11) − | 24.9 | 1.45/98.55/0 | 96.25 |
| | CD28 | | | |
| | (v29) 1 + 1 | | | |
| 18B | CD19 (2B11) − | 45.05 | 0/99.1/0.9 | 98.78 |
| | CD28 | | | |
| | (v15) 1 + 1 | | | |
| 18C | CD19 (2B11) − | 22.06 | 2.08/96.67/1.25 | 93.11 |
| | CD28 | | | |
| | (v8) 1 + 1 | | | |
| 18D | CD19 (2B11) − | 40.9 | 0/98.9/1.1 | 97.1 |
| | CD28 | | | |
| | (v11) 1 + 1 | | | |
| 18E | CD19 (2B11) − | 41.7 | 0.49/98.9/0.61 | 90.9 |
| | CD28 | | | |
| | (v27) 1 + 1 | | | |
| 18F | CD79b | 20.6 | 1.31/98.34/0.35 | 94.43 |
| | (huMA79b.v28) − | | | |
| | CD28(v15) | | | |
| | 1 + 1 | | | |

### Example 19

### Binding and Kinetic Analysis of Bispecific Antigen Binding Molecules Targeting CD28 and CD19 or CD79b

### 19.1 Kinetic Analysis of Bispecific Antigen Binding Molecules Targeting CD79b

[1091] Affinity (K_{D}) of huMA79b.v28 to recombinant CD79b-His (Sinobiological #29750-H08H) was measured by SPR by surface plasmon resonance using a Biacore T200 machine. For the capture of CD79b-His, an anti-penta HIS antibody was coupled to a flow cell of a CM5 chip by amine coupling. Immobilization levels of approx. 5000 units were used. CD79b-His was then diluted to a concentration of 1 nM and was captured by the anti-penta HIS antibody during 10s at a flow rate of 10 μl/min.

[1092] For the determination of the affinity (K_{D}) of the purified Molecule F (CD79b (huMA79b.v28)-CD28 (SA_variant 15) 1+1) a two-fold dilution series of the purified antigen binding molecule (varying concentration ranges between 125 and 0.49 nM) were injected at 30 l/min with an association time of 180s, and a dissociation time of 400s. HBS-EP⁺ buffer (GE-Healthcare standard buffer BR-1006-69 1:10 diluted) was injected for referencing. Regeneration was performed with 10 mM glycine pH 2.1 for 2×60 s. Association rate constants (kon) and dissociation rate constants (koff) were calculated using a simple one-to-one Langmuir binding model by simultaneously fitting the association and dissociation sensorgrams (FIG. 42). The equilibrium dissociation constant (K_{D}) was calculated as the ratio koff/kon. The results are shown in Table 41. The affinity of Molecule F (CD79b (huMA79b.v28)-CD28 (SA_variant 15) 1+1) to CD79b-His is 76 nM.

TABLE 41
Characterization of the binding of huMA79b.v28
to recombinant soluble CD79b-His

| clone | k on (1/Ms) | k off (1/s) | K_{D} (nM) |
|---|---|---|---|
| huMA79b.v28 | 2.57E+5 | 1.95E−2 | 76 |

### 19.2 Kinetic Analysis of Bispecific Antigen Binding Molecules Targeting CD28

[1093] Affinity (K_{D}) of the produced bispecific antigen binding molecules to CD28 was measured by SPR using a ProteOn XPR36 instrument (Biorad) at 25° C. with biotinylated huCD28-Fc antigen immobilized on NLC chips by neutravidin capture. Immobilization of recombinant antigens (ligand): Antigen was diluted with PBST (10 mM phosphate, 150 mM sodium chloride pH 7.4, 0.005% Tween 20) to 10 μg/ml, then injected at 30 μl/minute at varying contact times, to achieve immobilization levels of about 200, 400 or 800 response units (RU) in vertical orientation. Injection of analytes: For one-shot kinetics measurements, injection direction was changed to horizontal orientation, two-fold dilution series of purified bispecific CD 19-targeted anti-CD28 affinity variants (varying concentration ranges between 50 and 3.125 nM) were injected simultaneously at 50 μl/min along separate channels 1-5, with association times of 150s, and dissociation times of 450s. Buffer (PBST) was injected along the sixth channel to provide an “in-line” blank for referencing. Association rate constants (kₒₙ) and dissociation rate constants (k_{off}) were calculated using a simple one-to-one Langmuir binding model in ProteOn Manager v3.1 software by simultaneously fitting the association and dissociation sensorgrams. The equilibrium dissociation constant (K_{D}) was calculated as the ratio k_{off}/kₒₙ. Analyzed clones revealed K_{D} values in a broad range (between 1 and 50 nM).

### Example 20

### Binding of Bispecific CD28 Agonistic Antigen Binding Molecules to CD28-Expressing and CD19- or CD79b-Expressing Cells

[1094] Binding to human CD28 was tested with CHO cells expressing human CD28 (parental cell line CHO-k1 ATCC # CCL-61, modified to stably overexpress human CD28). To assess binding, cells were harvested, counted, checked for viability and re-suspended at 2.5×10⁵/ml in FACS buffer (eBioscience, Cat No 00-4222-26). 5×10⁴ cells were incubated in round-bottom 96-well plates for 2h at 4° C. with increasing concentrations of the CD28 binders (1 pM-100 nM). Then, cells were washed three times with cold FACS buffer, incubated for further 60 min at 4° C. with PE-conjugated, goat-anti human PE (Jackson ImmunoReserach, Cat No 109-116-098), washed once with cold FACS buffer, centrifuged and resuspended in 100 ul FACS buffer. To monitor unspecific binding interactions between constructs and cells, an anti-DP47 IgG was included as negative control. Binding was assessed by flow cytometry with a FACS Fortessa (BD, Software FACS Diva). Binding curves were obtained using GraphPadPrism6.

[1095] The monovalent one-armed IgG-like CD28 variant constructs showed differences in binding as can be seen from FIGS. 4A to 4C.

[1096] The binding to CD19 and CD79b was tested using B cell lines expressing different levels of CD19 and CD79b: Nalm6 (DSMZ # ACC 128), RCK8 (DSMZ # ACC 561), WSU DLCL2 (DSMZ # ACC 575) and Z138 (gift from M. Dyer, Univ. of Leicester).

[1097] To assess binding, cells were harvested, counted, checked for viability and re-suspended at 0.5 Mio cells/ml in FACS buffer (eBioscience, Cat No 00-4222-26). 5E4 cells were incubated in round-bottom 96-well plates for 1 h at 4° C. with increasing concentrations of the CD19-CD28 (or CD79b-CD28) constructs (10 pM-500 nM). Then, cells were washed twice with cold FACS buffer, incubated for further 30 min at 4° C. with PE-conjugated, goat-anti human PE (Jackson ImmunoReserach, Cat No 109-116-098), washed twice with cold FACS buffer, centrifuged and resuspended in 85 ul FACS buffer with DAPI (Roche, Cat No 10236276001) diluted 1:10000. To monitor unspecific binding interactions between constructs and cells, an anti-DP47 IgG was included as negative control. Binding was assessed by flow cytometry with a FACS Fortessa (BD, Software FACS Diva). Binding curves were obtained using GraphPadPrism7. A comparison of the binding of CD19-CD28 v15 to the different B cell lines is shown in FIGS. 43A and 43B.

[1098] FACS Analysis

[1099] To assess the relative level of CD19 at the surface of B cell lines (Nalm6, RCK8, WSU DLCL2 and Z138), cells were Fc-blocked prior to the staining using Human Fc Block (BD, Cat No 564220), then 2×10⁵ cells were centrifuged at 480×g for 5 min and washed with PBS.

[1100] Surface staining for CD19 (BV650 anti human, BioLegend #302238) was performed according to the supplier's indications. Cells were washed once with 150 μl/well of PBS and resuspended in 150 μl/well of PBS and analyzed using BD FACS Fortessa.

[1101] In vitro cell binding assays verified that all CD19-CD28 agonistic antibodies bind to human CD19 as well as human CD28 on cells in a concentration dependent manner (FIGS. 44A and 44B). As expected, no binding was detected with the anti-DP47 IgG, indicating that the detection of binding is due to specific CD28 and CD19 binding by the respective targeting moieties. The EC₅₀ values for the binding to CD28 are shown in Table 42 and the EC₅₀ values for the binding to CD19 are shown in Table 43.

TABLE 42
EC₅₀ values of CD19-CD28 agonistic
antibodies for binding to CD28

| ID | Molecules | EC₅₀ (nM) |
|---|---|---|
| P1AF0175 | CD19-CD28 v8 | 232 |
| P1AF0377 | CD19-CD28 v11 | 150.4 |
| P1AE9040 | CD19-CD28 v15 | 15.55 |
| P1AF0378 | CD19-CD28 v27 | 10.75 |
| P1AE8002 | CD19-CD28 v29 | 6.646 |

TABLE 43
EC₅₀ values of CD19-CD28 agonistic
antibodies for binding to CD19

| ID | Molecules | EC₅₀ (nM) |
|---|---|---|
| P1AF0175 | CD19-CD28 v8 | 0.2324 |
| P1AF0377 | CD19-CD28 v11 | 0.3631 |
| P1AE9040 | CD19-CD28 v15 | 0.416 |
| P1AF0378 | CD19-CD28 v27 | 0.368 |
| P1AE8002 | CD19-CD28 v29 | 0.2742 |

### Example 21

### In Vitro Functional Characterization of of Bispecific CD28 Agonistic Antigen Binding Molecules Targeting CD19 or CD79b

[1102] Several cell-based in vitro assays were performed with primary human PBMCs to evaluate the activity of CD28(SA) and bispecific CD19 or CD79b-targeted CD28 antigen binding molecules in the presence and absence of TCR signals provided by T-cell bispecific-(TCB) antibodies. T-cell proliferation, cytokine secretion, and tumor cell killing as determined by flow cytometry, cytokine ELISA, and live cell imaging were obtained as read-outs.

[1103] PBMC Isolation

[1104] Peripheral blood mononuclear cells (PBMCs) were prepared by density gradient centrifugation from enriched lymphocyte preparations of heparinized blood obtained from a Buffy Coat (Blutspende Zürich). 25 ml of blood (diluted 1:2 in PBS) were layered over 15 ml lymphoprep (STEMCELL technologies, Cat No 07851) and centrifuged at room temperature for 25 min at 845×g without brake. The PBMC-containing interphase was collected in 50 ml tubes with a 10 ml pipette. The cells were washed with PBS and centrifuged 5 min at 611×g. The supernatant was discarded, the pellet re-suspended in 50 ml PBS and centrifuged for 5 min at 304×g. The washing step was repeated, centrifuging at 171×g. The cells were re-suspended in RPMI 1640 Glutamax (containing 5% human serum, sodium pyruvate, NEAA, 50 μM 2-mercaptoethanol, Penicillin/Streptomycin) and processed for further functional analysis according to the respective assay protocol.

[1105] In Vitro Functional Characterization of CD19-CD28 and CD79b-CD28 Molecules Based on IL-2 Reporter Assay

[1106] To assess the ability of CD19-CD28 and CD79b-CD28 to support TCB-mediated T cell activation, IL-2 reporter cells (Promega, Ca No J1651) served as effector cells (Jurkat T cell line that expresses a luciferase reporter driven by the IL-2 promoter) and Nalm6, RCK8, WSU DLCL2 and Z138 served as tumor targets. 2×10⁴ tumor target cells were incubated in white flat-bottom 96-well plates for 6h at 37° C. with 10⁵ IL-2 reporter cells (E:T 5:1) in presence of suboptimal CD20-TCB (P1AD4071) concentrations (10 nM for Nalm6 or 0.05 nM for RCK8, WSU DLCL2 and Z138) alone or in combination with increasing concentrations of the CD 19-CD28 (or CD79b-CD28) constructs (0.2 pM-10 nM). Prior to the measurement, plates were incubated at room temperature for 15 min, and then 100 ul of substrate (ONE-Glo solution, Promega, Cat No E6120) was added to the cells. After 10 min of incubation at room temperature in the dark, Luminescence (counts/sec) was measured with a Tecan Spark 10M.

[1107] In Vitro Functional Characterization of CD19-CD28 Based on PBMC-Isolated T Cell Activation

[1108] To assess the ability of CD19-CD28 to support TCB-mediated T cell activation, pan T cells were used as effector cells and isolated from PBMCs by MACS, using the Pan T Cell Isolation Kit (Miltenyi Biotec, Cat No 130-096-535) according to the manufacturer's instructions and Nalm6, RCK8, WSU DLCL2 and Z138 served as tumor targets. 2×10⁴ tumor target cells were incubated in flat-bottom 96-well plates for 48h at 37° C. with 10⁵ pan T cells (E:T 5:1) in presence of suboptimal CD20-TCB (P1AD4071) concentrations (10 nM for Nalm6 or 0.05 nM for RCK8, WSU DLCL2 and Z 138) alone or in combination with increasing concentrations of the CD19-CD28 constructs (0.2 pM-10 nM). T cell activation was assessed via flow cytometry. Briefly, cells were centrifuged at 480×g for 5 min and washed with PBS. Surface staining for CD8 (BV421 anti human, BioLegend #301036), CD4 (PE-Cy7 anti human, BioLegend #344611), CD25 (BV605 anti human, BioLegend #302632), CD69 (PE anti human, BioLegend #310906) was performed according to the supplier's indications. Cells were washed once with 150 ul/well of PBS and resuspended in 150 ul/well of PBS and analyzed using BD FACS Fortessa.

[1109] Cytokine Release Assessment

[1110] To assess the ability of CD19-CD28 to trigger cytokine release in presence of TCR signaling, 5×10⁵ PBMCs were incubated in U-bottom 96-well plates for 48h at 37° C. in presence of CD19-CD28 (1 nM) and suboptimal CD20-TCB (P1AD4071) concentration (0.4 pM). To assess the ability of CD19-CD28 to trigger cytokine release in absence of TCR signaling, 5×10⁵ PBMCs were incubated in U-bottom 96-well plates for 48h at 37° C. in presence of increasing concentrations of the CD19-CD28 constructs (0.08 nM-100 nM). Cytokine release was assessed via Multiplex assay. 50 μl/well of supernatant was screened for G-CSF, GM-CSF, IFN-y, IL-113, IL-2, IL-4, IL-5, IL-6, IL-7, IL-8, IL-10, IL-12 (p70), IL-13, IL-17, MCP-1 (MCAF), MIP-1β and TNF-α secretion using the Bio-Plex Pro Human Cytokine 17-plex Assay (Bio-rad, Cat No m5000031yv) according to the supplier's indications.

[1111] CD19-CD28 Enhances CD20-TCB Mediated T Cell Activation on Various B Cell Lines

[1112] To assess the ability of CD19-CD28 antibodies to enhance CD20-TCB mediated effector function, T cell activation in TCB combination was assessed. To this end, IL-2 reporter Jurkat cells were co-cultured with four different CD19-expressing cell lines (Nalm6, WSU DLCL2, Z138, RCK8) for 6h in presence of increasing concentrations of CD19-CD28 v15 (P1AE9040) and fixed, limiting concentration of CD20-TCB (P1AD4071). CD20 TCB is an anti-CD20/anti-CD3 bispecific antibody in a 2+1 format as described in Example 1 of WO 2016/020309 A1. As depicted in FIGS. 45A to 45D, CD19-CD28 increases CD20-TCB mediated effector function in presence of all four B cell lines in a concentration dependent manner.

[1113] Affinity-Reduced CD28 Binder Variants are Functional In Vitro in a CD19-CD28 Bispecific Format

[1114] The original CD28(SA) clone has an affinity of K_{D}=1 nM. High affinity antibody clones harbor the risk to be subject to peripheral sink effects, especially if the target is highly expressed in peripheral blood, as is the case for CD28. In order to (i) reduce peripheral sink effects, and (ii) reduce the risk of peripheral T cell activation through off-tumor binding of targ. CD28 agonists to T cells, we generated a series of 31 CD28 clones with reduced affinities by introducing point mutations in the CDRs (see Example 1.1). Candidate clones were selected as previously described. 5 molecules with different CD28 affinities were generated in the CD19-targeted bispecific format: CD19-CD28 v8 (P1AF0175), CD19-CD28 v11 (P1AF0377), CD19-CD28 v15 (P1AE9040), CD19-CD28 v27 (P1AF0378) and CD19-CD28 v29 (P1AE8002). FIGS. 44A and 44B show that all generated CD19-CD28 molecules bind to human CD19 as well as CD28, and binding intensities correlate with binder affinities.

[1115] To assess whether affinity-reduced CD28 clone variants were functional and able to support TCB-mediated effector functions, we assessed T cell activation in TCB combination. To this end, IL-2 reporter Jurkat cells were co-cultured with CD19-expressing Nalm6 cells for 6h in presence of increasing concentrations of CD 19-CD28 and fixed, limiting concentration of CD20-TCB. As depicted in FIG. 46, all variants of the CD28 binders were functional and able to increase TCB-mediated T cell activation in a concentration dependent manner. Pan T cells were used as effector cells and isolated from PBMCs by MACS, using the Pan T Cell Isolation Kit (Miltenyi Biotec) according to the manufacturer's instructions.

[1116] CD19-CD28 does not Activate PBMC T Cells in Absence of TCR Signals

[1117] To confirm that CD19-CD28 constructs are inactive without a TCR signal such as the one provided by CD20-TCB, we assessed the activation status of PBMC-derived T cells after co-culture with CD20-expressing target cells (Nalm6) and CD19-CD28 in absence or presence of CD20-TCB. As depicted in FIG. 47, CD19-CD28 enhances CD20-TCB mediated CD69 expression in PBMC T cells in a dose-dependent manner, while in absence of TCB, CD19-CD28 does not lead to T cell activation, even at high concentrations (100 nM). This finding is confirmed by our observation that CD19-CD28 did not lead to cytokine release in PBMC derived T cells after co-incubation with CD19-CD28 v8 or CD19-CD28 v15 in presence or absence of CD20-TCB (FIGS. 48A to 48D). In conclusion, these data confirm that CD19-CD28 is not a superagonistic antibody but requires a TCR signal, i.e. provided by a TCB, to enhance T cell activation.

[1118] CD79b-CD28 Enhances CD20-TCB-Mediated T Cell Activation

[1119] In addition to CD19-targeted CD28 agonistic antibodies, we also generated CD79b-targeted CD28 antibodies to assess their ability to enhance CD20-TCB mediated T cell activation. For this, the CD79b positive B cell line Z138 was used. As shown in FIG. 49A, CD79b-CD28 binds to Z138. Further, CD79b-CD28 was able to enhance CD20-TCB-mediated IL-2 production of IL-2 Jurkat cells when incubated with Z138 in presence of 0.05 nM CD20-TCB (FIG. 49B).

### Example 22

### In Vivo Functional Characterization of Bispecific Antigen Binding Molecules Targeting CD28 and CD19

[1120] Efficacy Study with CD19-CD28 Bispecific Antigen Binding Molecules with Different CD28 Variants in NALM6 Xenograft in Humanized Mice

[1121] The efficacy study described in here was aimed to evaluate which CD28 variant in the CD19-CD28 bispecific antigen binding molecule will lead to stronger tumor growth inhibition in monotherapy in a CD19-positive human lymphoma model in fully humanized NSG mice.

[1122] Human NALM6 cells (B cell precursor leukemia) were originally obtained from ATCC and after expansion deposited in the Glycart internal cell bank. Cells were cultured in RPMI containing 10% FCS and 1x Glutamax. The cells were cultured at 37° C. in a water-saturated atmosphere at 5% CO₂. 50 microliters cell suspension (1×10⁶ NALM6 cells) mixed with 50 microliters Matrigel were injected subcutaneously in the flank of anaesthetized mice with a 22G to 30G needle.

[1123] Female NSG mice, age 4-5 weeks at start of the experiment (Jackson Laboratory) were maintained under specific-pathogen-free condition with daily cycles of 12 h light/12 h darkness according to committed guidelines (GV-Solas; Felasa; TierschG). The experimental study protocol was reviewed and approved by local government (ZH225-17). After arrival, animals were maintained for one week to get accustomed to the new environment and for observation. Continuous health monitoring was carried out on a regular basis.

[1124] Female NSG mice were injected i.p. with 15 mg/kg of Busulfan followed one day later by an i.v. injection of 1×10⁵ human hematopoietic stem cells isolated from cord blood. At week 14-16 after stem cell injection mice were bled sublingual and blood was analyzed by flow cytometry for successful humanization. Efficiently engrafted mice were randomized according to their human T cell frequencies into the different treatment groups. At that time, mice were injected with tumor cells s.c. as described (FIG. 50) and treated with the compounds or Histidine buffer (Vehicle) when tumor size reached appr. 150 mm³ (day18). All mice were injected i.v. with 200 μl of the appropriate solution. To obtain the proper amount of compounds per 200 μl, the stock solutions (Table 44) were diluted with Histidine buffer when necessary.

TABLE 4
Compositions used in the in vivo experiment

| | | Concentration |
|---|---|---|
| Compound | Formulation buffer | (mg/mL) |
| CD19-CD28 | 20 mM Histidine, | 5.63 (=stock |
| (variants) | 140 mM NaCl, | solution) |
| | pH 6.0 | |
| CD19-CD28 | 20 mM Histidine, | 3.53 (=stock |
| (variant 8) | 140 mM NaCl, | solution) |
| | pH 6.0 | |

[1125] Tumor growth was measured twice weekly using a caliper and tumor volume was calculated as followed:

Tv: (W²/2)×L (W: Width, L: Length)

[1126] The study was terminated at day 53. FIG. 51A shows the tumor growth kinetics (Mean, +SEM) and FIGS. 51B to 51D show the individual tumor growth kinetics per group and mouse. As described here, CD19-CD28 variant 8, as a single agent induced stronger tumor growth inhibition as compared to CD19-CD28 variant 15. Vehicle animal had to be sacrificed earlier due to the formation of metastasis upon s.c. tumor cell injection. The monotherapeutic effect in humanized mice can be explained by the boosting of Allo-reactive human T cells, that can be seen as a surrogate for neo-antigen recognition, in the mouse system.

### REFERENCES

[1127] Acuto, O., and Michel, F. (2003). CD28-mediated co-stimulation: a quantitative support for TCR signalling. Nat Rev Immunol 3, 939-951.
[1128] Atamaniuk, J., Gleiss A., Porpazcy E., Kainz B., Grunt T. W., Raderer M., Hilgarth B., Drach J., Ludwig H., Gisslinger H., Jaeger U., Gaiger A. (2012). Overexpression of G protein-coupled receptor 5D in the bone marrow is associated with poor prognosis in patients with multiple myeloma. Eur J Clin Invest. 42(9), 953-60.
[1129] Bahlis N. J., King A. M., Kolonias D. Carlson L. M., Liu H. Y., Hussein M. A., Terebelo H. R., Byrne G. E. Jr, Levine B. L., Boise L. H., Lee K. P. (2007). CD28-mediated regulation of multiple myeloma cell proliferation and survival. Blood 109 (11), 5002-5010.
[1130] Boomer, J. S., and Green, J. M. (2010). An enigmatic tail of CD28 signaling. Cold Spring Harb Perspect Biol 2, a002436.
[1131] Brauner-Osborne H., Jensen A. A., Sheppard P. O., Brodin B., Krogsgaard-Larsen P., O'Hara P. (2001). Cloning and characterization of a human orphan family C G-protein coupled receptor GPRC5D. Biochim. Biophys. Acta 1518(3), 237-48.
[1132] Carreno, B. M., and Collins, M. (2002). The B7 family of ligands and its receptors: new pathways for costimulation and inhibition of immune responses. Annu Rev Immunol 20, 29-53.
[1133] Chen, L., and Flies, D. B. (2013). Molecular mechanisms of T cell co-stimulation and co-inhibition. Nat Rev Immunol 13, 227-242.
[1134] Cho S. F., Anderson K. C., Tai Y. T. (2018). Targeting B Cell Maturation Antigen (BCMA) in Multiple Myeloma: Potential Uses of BCMA-Based Immunotherapy. Front Immunol. 9, 1821.
[1135] Cohen Y., Gutwein O., Garach-Jehoshua O., Bar-Haim A., Kornberg A. (2013). GPRC5D is a promising marker for monitoring the tumor load and to target multiple myeloma cells. Hematology 18(6), 348-51.
[1136] Engelhardt, J. J., Sullivan, T. J., and Allison, J. P. (2006). CTLA-4 overexpression inhibits T cell responses through a CD28-B7-dependent mechanism. J Immunol 177, 1052-1061.
[1137] Esensten, J. H., Helou, Y. A., Chopra, G., Weiss, A., and Bluestone, J. A. (2016). CD28 Costimulation: From Mechanism to Therapy. Immunity 44, 973-988.
[1138] Fraser, J. D., Irving, B. A., Crabtree, G. R., and Weiss, A. (1991). Regulation of interleukin-2 gene enhancer activity by the T cell accessory molecule CD28. Science 251, 313-316.
[1139] Gao Y., Wang X., Yan H., Zeng J., Ma S., Niu Y., Zhou G., Jiang Y., Chen Y. (2016). Comparative Transcriptome Analysis of Fetal Skin Reveals Key Genes Related to Hair Follicle Morphogenesis in Cashmere Goats. PLoS One 11(3), e0151118.
[1140] Hui, E., Cheung, J., Zhu, J., Su, X., Taylor, M. J., Wallweber, H. A., Sasmal, D. K., Huang, J., Kim, J. M., Mellman, I., and Vale, R. D. (2017). T cell costimulatory receptor CD28 is a primary target for PD-1-mediated inhibition. Science 355, 1428-1433.
[1141] Hunig, T. (2012). The storm has cleared: lessons from the CD28 superagonist TGN1412 trial. Nat Rev Immunol 12, 317-318.
[1142] Inoue, S., Nambu T. and Shimomura T. (2004). The RAIG family member, GPRC5D, is associated with hard-keratinized structures. J Invest Dermatol. 122(3), 565-73.
[1143] June, C. H., Ledbetter, J. A., Gillespie, M. M., Lindsten, T., and Thompson, C. B. (1987). T-cell proliferation involving the CD28 pathway is associated with cyclosporine-resistant interleukin 2 gene expression. Mol Cell Biol 7, 4472-4481.
[1144] Kamphorst, A. O., Wieland, A., Nasti, T., Yang, S., Zhang, R., Barber, D. L., Konieczny, B. T., Daugherty, C. Z., Koenig, L., Yu, K., et al. (2017). Rescue of exhausted CD8 T cells by PD-1-targeted therapies is CD28-dependent. Science 355, 1423-1427.
[1145] Lavin, Y., Kobayashi, S., Leader, A., Amir, E. D., Elefant, N., Bigenwald, C., Remark, R., Sweeney, R., Becker, C. D., Levine, J. H., et al. (2017). Innate Immune Landscape in Early Lung Adenocarcinoma by Paired Single-Cell Analyses. Cell 169, 750-765 e717.
[1146] Linsley, P. S., Clark, E. A., and Ledbetter, J. A. (1990). T-cell antigen CD28 mediates adhesion with B cells by interacting with activation antigen B7/BB-1. Proc Natl Acad Sci USA 87, 5031-5035.
[1147] Moreau, P. and S. V. Rajkumar (2016). Multiple myeloma-translation of trial results into reality. Lancet, 388(10040): p. 111-113.
[1148] Murray M. E., Gavile C. M., Nair J. R., Koorella C., Carlson L. M., Buac D., Utley A., Chesi M., Bergsagel P. L., Boise L. H., Lee K. P. (2014). CD28-mediated pro-survival signaling induces chemotherapeutic resistance in multiple myeloma. Blood 123 (24), 3770-3779.
[1149] Römer, P. S., Berr, S., Avota, E., Na, S. Y., Battaglia, M., ten Berge, I., Einsele, H., and Hunig, T. (2011). Preculture of PBMCs at high cell density increases sensitivity of T-cell responses, revealing cytokine release by CD28 superagonist TGN1412. Blood 118, 6772-6782.
[1150] Tai, X., Van Laethem, F., Sharpe, A. H., and Singer, A. (2007). Induction of autoimmune disease in CTLA-4−/− mice depends on a specific CD28 motif that is required for in vivo costimulation. Proc Natl Acad Sci USA 104, 13756-13761.
[1151] Thompson, C. B., Lindsten, T., Ledbetter, J. A., Kunkel, S. L., Young, H. A., Emerson, S. G., Leiden, J. M., and June, C. H. (1989). CD28 activation pathway regulates the production of multiple T-cell-derived lymphokines/cytokines. Proc Natl Acad Sci USA 86, 1333-1337.
[1152] Tirosh, I., Izar, B., Prakadan, S. M., Wadsworth, M. H., 2nd, Treacy, D., Trombetta, J. J., Rotem, A., Rodman, C., Lian, C., Murphy, G., et al. (2016). Dissecting the multicellular ecosystem of metastatic melanoma by single-cell RNA-seq. Science 352, 189-196.
[1153] Zheng, C., Zheng, L., Yoo, J. K., Guo, H., Zhang, Y., Guo, X., Kang, B., Hu, R., Huang, J. Y., Zhang, Q., et al. (2017). Landscape of Infiltrating T Cells in Liver Cancer Revealed by Single-Cell Sequencing. Cell 169, 1342-1356 e1316.

The application's sequence listing, which the Patent Office published only in electronic form, follows.

SEQUENCE LISTING (611 sequences)

SEQ ID NO: 1 - protein, 220 aa, Homo sapiens
MLRLLLALNLFPSIQVTGNKILVKQSPMLVAYDNAVNLSCKYSYNLFSREFRASLHKGLDSAVEVCVVYGNYSQQLQVYSKTGFNCDGKLGNESVTFYLQNLYVNQTDIYFCKIEVMYPPPYLDNEKSNGTIIHVKGKHLCPSPLFPGPSKPFWVLVVVGGVLACYSLLVTVAFIIFWVRSKRSRLLHSDYMNMTPRRPGPTRKHYQPYAPPRDFAAYRS

SEQ ID NO: 2 - protein, 760 aa, Homo sapiens
MKTWVKIVFGVATSAVLALLVMCIVLRPSRVHNSEENTMRALTLKDILNGTFSYKTFFPNWISGQEYLHQSADNNIVLYNIETGQSYTILSNRTMKSVNASNYGLSPDRQFVYLESDYSKLWRYSYTATYYIYDLSNGEFVRGNELPRPIQYLCWSPVGSKLAYVYQNNIYLKQRPGDPPFQITFNGRENKIFNGIPDWVYEEEMLATKYALWWSPNGKFLAYAEFNDTDIPVIAYSYYGDEQYPRTINIPYPKAGAKNPVVRIFIIDTTYPAYVGPQEVPVPAMIASSDYYFSWLTWVTDERVCLQWLKRVQNVSVLSICDFREDWQTWDCPKTQEHIEESRTGWAGGFFVSTPVFSYDAISYYKIFSDKDGYKHIHYIKDTVENAIQITSGKWEAINIFRVTQDSLFYSSNEFEEYPGRRNIYRISIGSYPPSKKCVTCHLRKERCQYYTASFSDYAKYYALVCYGPGIPISTLHDGRTDQEIKILEENKELENALKNIQLPKEEIKKLEVDEITLWYKMILPPQFDRSKKYPLLIQVYGGPCSQSVRSVFAVNWISYLASKEGMVIALVDGRGTAFQGDKLLYAVYRKLGVYEVEDQITAVRKFIEMGFIDEKRIAIWGWSYGGYVSSLALASGTGLFKCGIAVAPVSSWEYYASVYTERFMGLPTKDDNLEHYKNSTVMARAEYFRNVDYLLIHGTADDNVHFQNSAQIAKALVNAQVDFQAMWYSDQNHGLSGLSTNHLYTHMTHFLKQCFSLSD

SEQ ID NO: 3 - protein, 702 aa, Homo sapiens
MESPSAPPHRWCIPWQRLLLTASLLTFWNPPTTAKLTIESTPFNVAEGKEVLLLVHNLPQHLFGYSWYKGERVDGNRQIIGYVIGTQQATPGPAYSGREIIYPNASLLIQNIIQNDTGFYTLHVIKSDLVNEEATGQFRVYPELPKPSISSNNSKPVEDKDAVAFTCEPETQDATYLWWVNNQSLPVSPRLQLSNGNRTLTLFNVTRNDTASYKCETQNPVSARRSDSVILNVLYGPDAPTISPLNTSYRSGENLNLSCHAASNPPAQYSWFVNGTFQQSTQELFIPNITVNNSGSYTCQAHNSDTGLNRTTVTTITVYAEPPKPFITSNNSNPVEDEDAVALTCEPEIQNTTYLWWVNNQSLPVSPRLQLSNDNRTLTLLSVTRNDVGPYECGIQNKLSVDHSDPVILNVLYGPDDPTISPSYTYYRPGVNLSLSCHAASNPPAQYSWLIDGNIQQHTQELFISNITEKNSGLYTCQANNSASGHSRTTVKTITVSAELPKPSISSNNSKPVEDKDAVAFTCEPEAQNTTYLWWVNGQSLPVSPRLQLSNGNRTLTLFNVTRNDARAYVCGIQNSVSANRSDPVTLDVLYGPDTPIISPPDSSYLSGANLNLSCHSASNPSPQYSWRINGIPQQHTQVLFIAKITPNNNGTYACFVSNLATGRNNSIVKSITVSASGTSPGLSAGATVGIMIGVLVGVALI

SEQ ID NO: 4 - protein, 5 aa, Artificial Sequence
  FAP(28H1)  CDR-H1
SHAMS

SEQ ID NO: 5 - protein, 16 aa, Artificial Sequence
  FAP(28H1)  CDR-H2
AIWASGEQYYADSVKG

SEQ ID NO: 6 - protein, 8 aa, Artificial Sequence
  FAP(28H1)  CDR-H3
GWLGNFDY

SEQ ID NO: 7 - protein, 12 aa, Artificial Sequence
  FAP(28H1)  CDR-L1
RASQSVSRSYLA

SEQ ID NO: 8 - protein, 7 aa, Artificial Sequence
  FAP(28H1)  CDR-L2
GASTRAT

SEQ ID NO: 9 - protein, 9 aa, Artificial Sequence
  FAP(28H1)  CDR-L3
QQGQVIPPT

SEQ ID NO: 10 - protein, 116 aa, Artificial Sequence
  FAP(28H1) VH
EVQLLESGGGLVQPGGSLRLSCAASGFTFSSHAMSWVRQAPGKGLEWVSAIWASGEQYYADSVKGRFTISRDNSKNTLYLQMNSLRAEDTAVYYCAKGWLGNFDYWGQGTLVTVSS

SEQ ID NO: 11 - protein, 108 aa, Artificial Sequence
  FAP(28H1) VL
EIVLTQSPGTLSLSPGERATLSCRASQSVSRSYLAWYQQKPGQAPRLLIIGASTRATGIPDRFSGSGSGTDFTLTISRLEPEDFAVYYCQQGQVIPPTFGQGTKVEIK

SEQ ID NO: 12 - protein, 5 aa, Artificial Sequence
  FAP(4B9)  CDR-H1
SYAMS

SEQ ID NO: 13 - protein, 17 aa, Artificial Sequence
  FAP(4B9)  CDR-H2
AIIGSGASTYYADSVKG

SEQ ID NO: 14 - protein, 8 aa, Artificial Sequence
  FAP(4B9)  CDR-H3
GWFGGFNY

SEQ ID NO: 15 - protein, 12 aa, Artificial Sequence
  FAP(4B9)  CDR-L1
RASQSVSRSYLA

SEQ ID NO: 16 - protein, 7 aa, Artificial Sequence
  FAP(4B9)  CDR-L2
VGSRRAT

SEQ ID NO: 17 - protein, 9 aa, Artificial Sequence
  FAP(4B9)  CDR-L3
QQGIMLPPT

SEQ ID NO: 18 - protein, 117 aa, Artificial Sequence
  FAP(4B9)  VH
EVQLLESGGGLVQPGGSLRLSCAASGFTFSSYAMSWVRQAPGKGLEWVSAIIGSGASTYYADSVKGRFTISRDNSKNTLYLQMNSLRAEDTAVYYCAKGWFGGFNYWGQGTLVTVSS

SEQ ID NO: 19 - protein, 108 aa, Artificial Sequence
  FAP(4B9)  VL
EIVLTQSPGTLSLSPGERATLSCRASQSVTSSYLAWYQQKPGQAPRLLINVGSRRATGIPDRFSGSGSGTDFTLTISRLEPEDFAVYYCQQGIMLPPTFGQGTKVEIK

SEQ ID NO: 20 - protein, 5 aa, Artificial Sequence
  CD28(SA) CDR-H1
SYYIH

SEQ ID NO: 21 - protein, 17 aa, Artificial Sequence
  CD28(SA) CDR-H2
CIYPGNVNTNYNEKFKD

SEQ ID NO: 22 - protein, 11 aa, Artificial Sequence
  CD28(SA) CDR-H3
SHYGLDWNFDV

SEQ ID NO: 23 - protein, 11 aa, Artificial Sequence
  CD28(SA) CDR-L1
HASQNIYVWLN

SEQ ID NO: 24 - protein, 7 aa, Artificial Sequence
  CD28(SA) CDR-L2
KASNLHT

SEQ ID NO: 25 - protein, 9 aa, Artificial Sequence
  CD28(SA) CDR-L3
QQGQTYPYT

SEQ ID NO: 26 - protein, 120 aa, Artificial Sequence
  CD28(SA) VH
QVQLVQSGAEVKKPGASVKVSCKASGYTFTSYYIHWVRQAPGQGLEWIGCIYPGNVNTNYNEKFKDRATLTVDTSISTAYMELSRLRSDDTAVYFCTRSHYGLDWNFDVWGQGTTVTVSS

SEQ ID NO: 27 - protein, 107 aa, Artificial Sequence
  CD28(SA) VL
DIQMTQSPSSLSASVGDRVTITCHASQNIYVWLNWYQQKPGKAPKLLIYKASNLHTGVPSRFSGSGSGTDFTLTISSLQPEDFATYYCQQGQTYPYTFGGGTKVEIK

SEQ ID NO: 28 - protein, 5 aa, Artificial Sequence
  CD28(mAb 9.3) CDR-H1
DYGVH

SEQ ID NO: 29 - protein, 16 aa, Artificial Sequence
  CD28(mAb 9.3) CDR-H2
VIWAGGGTNYNSALMS

SEQ ID NO: 30 - protein, 12 aa, Artificial Sequence
  CD28(mAb 9.3) CDR-H3
DKGYSYYYSMDY

SEQ ID NO: 31 - protein, 15 aa, Artificial Sequence
  CD28(mAb 9.3) CDR-L1
RASESVEYYVTSLMQ

SEQ ID NO: 32 - protein, 7 aa, Artificial Sequence
  CD28(mAb 9.3) CDR-L2
AASNVES

SEQ ID NO: 33 - protein, 9 aa, Artificial Sequence
  CD28(mAb 9.3) CDR-L3
QQSRKVPYT

SEQ ID NO: 34 - protein, 120 aa, Artificial Sequence
  CD28(mAb 9.3) VH
EVKLQQSGPGLVTPSQSLSITCTVSGFSLSDYGVHWVRQSPGQGLEWLGVIWAGGGTNYNSALMSRKSISKDNSKSQVFLKMNSLQADDTAVYYCARDKGYSYYYSMDYWGQGTSVTVSS

SEQ ID NO: 35 - protein, 111 aa, Artificial Sequence
  CD28(mAb 9.3) VL
DIELTQSPASLAVSLGQRATISCRASESVEYYVTSLMQWYQQKPGQPPKLLIFAASNVESGVPARFSGSGSGTNFSLNIHPVDEDDVAMYFCQQSRKVPYTFGGGTKLEIK

SEQ ID NO: 36 - protein, 5 aa, Artificial Sequence
  CD28 CDR-H1 consensus
SYYIH

SEQ ID NO: 37 - protein, 17 aa, Artificial Sequence
  CD28 CDR-H2 consensus
  VARIANT (5)..(5): Gly or Arg
  VARIANT (6)..(6): Asn or Asp
  VARIANT (7)..(7): Val or Gly
  VARIANT (8)..(8): Asn, Gln or Ala
SIYPXXXXTNYNEKFKD

SEQ ID NO: 38 - protein, 11 aa, Artificial Sequence
  CD28 CDR-H3 consensus
  VARIANT (5)..(5): Leu or Ala
  VARIANT (7)..(7): Trp, His, Tyr or Phe
SHYGXDXNFDV

SEQ ID NO: 39 - protein, 11 aa, Artificial Sequence
  CD28 CDR-L1 consensus
  VARIANT (1)..(1): His or Arg
  VARIANT (5)..(5): Asn or Gly
  VARIANT (7)..(7): Tyr or Ser
  VARIANT (8)..(8): Val or Asn
  VARIANT (9)..(9): Trp, His, Phe or Tyr
XASQXIXXXLN

SEQ ID NO: 40 - protein, 7 aa, Artificial Sequence
  CD28 CDR-L2 consensus
  VARIANT (1)..(1): Lys or Tyr
  VARIANT (2)..(2): Ala or Gly
  VARIANT (4)..(4): Asn or Ser
  VARIANT (6)..(6): His or Tyr
  VARIANT (7)..(7): Thr or Ser
XXSXLXX

SEQ ID NO: 41 - protein, 9 aa, Artificial Sequence
  CD28 CDR-L3 consensus
  VARIANT (3)..(3): Gly or Ala
QQXQTYPYT

SEQ ID NO: 42 - protein, 120 aa, Artificial Sequence
  CD28 VH variant a
QVQLVQSGAEVKKPGASVKVSCKASGYTFTSYYIHWVRQAPGQGLEWIGSIYPGNVNTNYNEKFKDRATLTVDTSISTAYMELSRLRSDDTAVYFCTRSHYGLDWNFDVWGQGTTVTVSS

SEQ ID NO: 43 - protein, 120 aa, Artificial Sequence
  CD28 VH variant b
QVQLVQSGAEVKKPGASVKVSCKASGYTFTSYYIHWVRQAPGQGLEWIGSIYPGNVQTNYNEKFKDRATLTVDTSISTAYMELSRLRSDDTAVYFCTRSHYGLDHNFDVWGQGTTVTVSS

SEQ ID NO: 44 - protein, 120 aa, Artificial Sequence
  CD28 VH variant c
QVQLVQSGAEVKKPGASVKVSCKASGYTFTSYYIHWVRQAPGQGLEWIGSIYPGNVQTNYNEKFKDRATLTVDTSISTAYMELSRLRSDDTAVYFCTRSHYGADHNFDVWGQGTTVTVSS

SEQ ID NO: 45 - protein, 120 aa, Artificial Sequence
  CD28 VH variant d
QVQLVQSGAEVKKPGASVKVSCKASGYTFTSYYIHWVRQAPGQGLEWIGSIYPRDGQTNYNEKFKDRATLTVDTSISTAYMELSRLRSDDTAVYFCTRSHYGLDYNFDVWGQGTTVTVSS

SEQ ID NO: 46 - protein, 120 aa, Artificial Sequence
  CD28 VH variant e
QVQLVQSGAEVKKPGASVKVSCKASGYTFTSYYIHWVRQAPGQGLEWIGSIYPGNVQTNYNEKFKDRATLTVDTSISTAYMELSRLRSDDTAVYFCTRSHYGLDWNFDVWGQGTTVTVSS

SEQ ID NO: 47 - protein, 120 aa, Artificial Sequence
  CD28 VH variant f
QVQLVQSGAEVKKPGASVKVSCKASGYTFTSYYIHWVRQAPGQGLEWIGSIYPGNVQTNYNEKFKDRATLTVDTSISTAYMELSRLRSDDTAVYFCTRSHYGLDFNFDVWGQGTTVTVSS

SEQ ID NO: 48 - protein, 120 aa, Artificial Sequence
  CD28 VH variant g
QVQLVQSGAEVKKPGASVKVSCKASGYTFTSYYIHWVRQAPGQGLEWIGSIYPRNVQTNYNEKFKDRATLTVDTSISTAYMELSRLRSDDTAVYFCTRSHYGLDHNFDVWGQGTTVTVSS

SEQ ID NO: 49 - protein, 120 aa, Artificial Sequence
  CD28 VH variant h
QVQLVQSGAEVKKPGASVKVSCKASGYTFTSYYIHWVRQAPGQGLEWIGSIYPRDVQTNYNEKFKDRATLTVDTSISTAYMELSRLRSDDTAVYFCTRSHYGLDHNFDVWGQGTTVTVSS

SEQ ID NO: 50 - protein, 120 aa, Artificial Sequence
  CD28 VH variant i
EVQLVESGGGLVQPGGSLRLSCAASGFTFTSYYIHWVRQAPGKGLEWVASIYPGNVNTRYADSVKGRFTISADTSKNTAYLQMNSLRAEDTAVYYCTRSHYGLDWNFDVWGQGTTVTVSS

SEQ ID NO: 51 - protein, 120 aa, Artificial Sequence
  CD28 VH variant j
EVQLVESGGGLVQPGGSLRLSCAASGFTFTSYYIHWVRQAPGKGLEWVASIYPGNVATRYADSVKGRFTISADTSKNTAYLQMNSLRAEDTAVYYCTRSHYGLDWNFDVWGQGTTVTVSS

SEQ ID NO: 52 - protein, 107 aa, Artificial Sequence
  CD28 VL variant k
DIQMTQSPSSLSASVGDRVTITCHASQNIYVHLNWYQQKPGKAPKLLIYKASNLHTGVPSRFSGSGSGTDFTLTISSLQPEDFATYYCQQAQTYPYTFGGGTKVEIK

SEQ ID NO: 53 - protein, 107 aa, Artificial Sequence
  CD28 VL variant l
DIQMTQSPSSLSASVGDRVTITCHASQNIYVFLNWYQQKPGKAPKLLIYKASNLHTGVPSRFSGSGSGTDFTLTISSLQPEDFATYYCQQGQTYPYTFGGGTKVEIK

SEQ ID NO: 54 - protein, 107 aa, Artificial Sequence
  CD28 VL variant m
DIQMTQSPSSLSASVGDRVTITCHASQNIYVYLNWYQQKPGKAPKLLIYKASNLHTGVPSRFSGSGSGTDFTLTISSLQPEDFATYYCQQGQTYPYTFGGGTKVEIK

SEQ ID NO: 55 - protein, 107 aa, Artificial Sequence
  CD28 VL variant n
DIQMTQSPSSLSASVGDRVTITCHASQGISNYLNWYQQKPGKAPKLLIYKASNLHTGVPSRFSGSGSGTDFTLTISSLQPEDFATYYCQQGQTYPYTFGGGTKVEIK

SEQ ID NO: 56 - protein, 107 aa, Artificial Sequence
  CD28 VL variant o
DIQMTQSPSSLSASVGDRVTITCHASQNIYVWLNWYQQKPGKAPKLLIYYTSSLHSGVPSRFSGSGSGTDFTLTISSLQPEDFATYYCQQGQTYPYTFGGGTKVEIK

SEQ ID NO: 57 - protein, 107 aa, Artificial Sequence
  CD28 VL variant p
DIQMTQSPSSLSASVGDRVTITCHASQGISNYLNWYQQKPGKAPKLLIYYTSSLHSGVPSRFSGSGSGTDFTLTISSLQPEDFATYYCQQGQTYPYTFGGGTKVEIK

SEQ ID NO: 58 - protein, 107 aa, Artificial Sequence
  CD28 VL variant q
DIQMTQSPSSLSASVGDRVTITCHASQGISNHLNWYQQKPGKAPKLLIYKASNLHTGVPSRFSGSGSGTDFTLTISSLQPEDFATYYCQQGQTYPYTFGGGTKVEIK

SEQ ID NO: 59 - protein, 107 aa, Artificial Sequence
  CD28 VL variant r
DIQMTQSPSSLSASVGDRVTITCHASQGIYVYLNWYQQKPGKAPKLLIYKASNLHTGVPSRFSGSGSGTDFTLTISSLQPEDFATYYCQQGQTYPYTFGGGTKVEIK

SEQ ID NO: 60 - protein, 107 aa, Artificial Sequence
  CD28 VL variant s
DIQMTQSPSSLSASVGDRVTITCHASQGISVYLNWYQQKPGKAPKLLIYKASNLHTGVPSRFSGSGSGTDFTLTISSLQPEDFATYYCQQGQTYPYTFGGGTKVEIK

SEQ ID NO: 61 - protein, 107 aa, Artificial Sequence
  CD28 VL variant t
DIQMTQSPSSLSASVGDRVTITCRASQNIYVWLNWYQQKPGKAPKLLIYKASNLYSGVPSRFSGSRSGTDFTLTISSLQPEDFATYYCQQGQTYPYTFGQGTKLEIK

SEQ ID NO: 62 - protein, 214 aa, Artificial Sequence
  CD28(SA) light chain
DIQMTQSPSSLSASVGDRVTITCHASQNIYVWLNWYQQKPGKAPKLLIYKASNLHTGVPSRFSGSGSGTDFTLTISSLQPEDFATYYCQQGQTYPYTFGGGTKVEIKRTVAAPSVFIFPPSDEQLKSGTASVVCLLNNFYPREAKVQWKVDNALQSGNSQESVTEQDSKDSTYSLSSTLTLSKADYEKHKVYACEVTHQGLSSPVTKSFNRGEC

SEQ ID NO: 63 - protein, 447 aa, Artificial Sequence
  CD28(SA) hu IgG4 heavy chain
QVQLVQSGAEVKKPGASVKVSCKASGYTFTSYYIHWVRQAPGQGLEWIGCIYPGNVNTNYNEKFKDRATLTVDTSISTAYMELSRLRSDDTAVYFCTRSHYGLDWNFDVWGQGTTVTVSSASTKGPSVFPLAPCSRSTSESTAALGCLVKDYFPEPVTVSWNSGALTSGVHTFPAVLQSSGLYSLSSVVTVPSSSLGTKTYTCNVDHKPSNTKVDKRVESKYGPPCPSCPAPEFLGGPSVFLFPPKPKDTLMISRTPEVTCVVVDVSQEDPEVQFNWYVDGVEVHNAKTKPREEQFNSTYRVVSVLTVLHQDWLNGKEYKCKVSNKGLPSSIEKTISKAKGQPREPQVYTLPPSQEEMTKNQVSLTCLVKGFYPSDIAVEWESNGQPENNYKTTPPVLDSDGSFFLYSRLTVDKSRWQEGNVFSCSVMHEALHNHYTQKSLSLSLGK

SEQ ID NO: 64 - protein, 450 aa, Artificial Sequence
  CD28(SA) hu IgG1 PGLALA heavy chain
QVQLVQSGAEVKKPGASVKVSCKASGYTFTSYYIHWVRQAPGQGLEWIGCIYPGNVNTNYNEKFKDRATLTVDTSISTAYMELSRLRSDDTAVYFCTRSHYGLDWNFDVWGQGTTVTVSSASTKGPSVFPLAPSSKSTSGGTAALGCLVKDYFPEPVTVSWNSGALTSGVHTFPAVLQSSGLYSLSSVVTVPSSSLGTQTYICNVNHKPSNTKVDKKVEPKSCDKTHTCPPCPAPEAAGGPSVFLFPPKPKDTLMISRTPEVTCVVVDVSHEDPEVKFNWYVDGVEVHNAKTKPREEQYNSTYRVVSVLTVLHQDWLNGKEYKCKVSNKALGAPIEKTISKAKGQPREPQVYTLPPSRDELTKNQVSLTCLVKGFYPSDIAVEWESNGQPENNYKTTPPVLDSDGSFFLYSKLTVDKSRWQQGNVFSCSVMHEALHNHYTQKSLSLSPGK

SEQ ID NO: 65 - protein, 214 aa, Artificial Sequence
  CD28(SA)  hu IgG light chain "RK"
DIQMTQSPSSLSASVGDRVTITCHASQNIYVWLNWYQQKPGKAPKLLIYKASNLHTGVPSRFSGSGSGTDFTLTISSLQPEDFATYYCQQGQTYPYTFGGGTKVEIKRTVAAPSVFIFPPSDRKLKSGTASVVCLLNNFYPREAKVQWKVDNALQSGNSQESVTEQDSKDSTYSLSSTLTLSKADYEKHKVYACEVTHQGLSSPVTKSFNRGEC

SEQ ID NO: 66 - protein, 448 aa, Artificial Sequence
  CD28(SA) hu IgG1 PGLALA Fc knob
QVQLVQSGAEVKKPGASVKVSCKASGYTFTSYYIHWVRQAPGQGLEWIGCIYPGNVNTNYNEKFKDRATLTVDTSISTAYMELSRLRSDDTAVYFCTRSHYGLDWNFDVWGQGTTVTVSSASTKGPSVFPLAPSSKSTSGGTAALGCLVEDYFPEPVTVSWNSGALTSGVHTFPAVLQSSGLYSLSSVVTVPSSSLGTQTYICNVNHKPSNTKVDEKVEPKSCDKTHTCPPCPAPEAAGGPSVFLFPPKPKDTLMISRTPEVTCVVVDVSHEDPEVKFNWYVDGVEVHNAKTKPREEQYNSTYRVVSVLTVLHQDWLNGKEYKCKVSNKALGAPIEKTISKAKGQPREPQVYTLPPCRDELTKNQVSLWCLVKGFYPSDIAVEWESNGQPENNYKTTPPVLDSDGSFFLYSKLTVDKSRWQQGNVFSCSVMHEALHNHYTQKSLSLSP

SEQ ID NO: 67 - protein, 438 aa, Artificial Sequence
  FAP(4B9) VL-CH hu IgG1 PGLALA Fc hole
EIVLTQSPGTLSLSPGERATLSCRASQSVTSSYLAWYQQKPGQAPRLLINVGSRRATGIPDRFSGSGSGTDFTLTISRLEPEDFAVYYCQQGIMLPPTFGQGTKVEIKSSASTKGPSVFPLAPSSKSTSGGTAALGCLVKDYFPEPVTVSWNSGALTSGVHTFPAVLQSSGLYSLSSVVTVPSSSLGTQTYICNVNHKPSNTKVDKKVEPKSCDKTHTCPPCPAPEAAGGPSVFLFPPKPKDTLMISRTPEVTCVVVDVSHEDPEVKFNWYVDGVEVHNAKTKPREEQYNSTYRVVSVLTVLHQDWLNGKEYKCKVSNKALGAPIEKTISKAKGQPREPQVCTLPPSRDELTKNQVSLSCAVKGFYPSDIAVEWESNGQPENNYKTTPPVLDSDGSFFLVSKLTVDKSRWQQGNVFSCSVMHEALHNHYTQKSLSLSP

SEQ ID NO: 68 - protein, 224 aa, Artificial Sequence
  FAP(4B9) VH-Ckappa
EVQLLESGGGLVQPGGSLRLSCAASGFTFSSYAMSWVRQAPGKGLEWVSAIIGSGASTYYADSVKGRFTISRDNSKNTLYLQMNSLRAEDTAVYYCAKGWFGGFNYWGQGTLVTVSSASVAAPSVFIFPPSDEQLKSGTASVVCLLNNFYPREAKVQWKVDNALQSGNSQESVTEQDSKDSTYSLSSTLTLSKADYEKHKVYACEVTHQGLSSPVTKSFNRGEC

SEQ ID NO: 69 - protein, 820 aa, Artificial Sequence
  CD28(SA) VHCH-VHCH Fc knob FAP(4B9) VH PGLALA
QVQLVQSGAEVKKPGASVKVSCKASGYTFTSYYIHWVRQAPGQGLEWIGCIYPGNVNTNYNEKFKDRATLTVDTSISTAYMELSRLRSDDTAVYFCTRSHYGLDWNFDVWGQGTTVTVSSASTKGPSVFPLAPSSKSTSGGTAALGCLVKDYFPEPVTVSWNSGALTSGVHTFPAVLQSSGLYSLSSVVTVPSSSLGTQTYICNVNHKPSNTKVDKKVEPKSCDGGGGSGGGGSQVQLVQSGAEVKKPGASVKVSCKASGYTFTSYYIHWVRQAPGQGLEWIGCIYPGNVNTNYNEKFKDRATLTVDTSISTAYMELSRLRSDDTAVYFCTRSHYGLDWNFDVWGQGTTVTVSSASTKGPSVFPLAPSSKSTSGGTAALGCLVKDYFPEPVTVSWNSGALTSGVHTFPAVLQSSGLYSLSSVVTVPSSSLGTQTYICNVNHKPSNTKVDKKVEPKSCDKTHTCPPCPAPEAAGGPSVFLFPPKPKDTLMISRTPEVTCVVVDVSHEDPEVKFNWYVDGVEVHNAKTKPREEQYNSTYRVVSVLTVLHQDWLNGKEYKCKVSNKALGAPIEKTISKAKGQPREPQVYTLPPCRDELTKNQVSLWCLVKGFYPSDIAVEWESNGQPENNYKTTPPVLDSDGSFFLYSKLTVDKSRWQQGNVFSCSVMHEALHNHYTQKSLSLSPGGGGGSGGGGSGGGGSGGGGSEVQLLESGGGLVQPGGSLRLSCAASGFTFSSYAMSWVRQAPGKGLEWVSAIIGSGASTYYADSVKGRFTISRDNSKNTLYLQMNSLRAEDTAVYYCAKGWFGGFNYWGQGTLVTVSS

SEQ ID NO: 70 - protein, 811 aa, Artificial Sequence
  CD28(SA) VHCH-VHCH Fc hole FAP(4B9) VL PGLALA
QVQLVQSGAEVKKPGASVKVSCKASGYTFTSYYIHWVRQAPGQGLEWIGCIYPGNVNTNYNEKFKDRATLTVDTSISTAYMELSRLRSDDTAVYFCTRSHYGLDWNFDVWGQGTTVTVSSASTKGPSVFPLAPSSKSTSGGTAALGCLVKDYFPEPVTVSWNSGALTSGVHTFPAVLQSSGLYSLSSVVTVPSSSLGTQTYICNVNHKPSNTKVDKKVEPKSCDGGGGSGGGGSQVQLVQSGAEVKKPGASVKVSCKASGYTFTSYYIHWVRQAPGQGLEWIGCIYPGNVNTNYNEKFKDRATLTVDTSISTAYMELSRLRSDDTAVYFCTRSHYGLDWNFDVWGQGTTVTVSSASTKGPSVFPLAPSSKSTSGGTAALGCLVKDYFPEPVTVSWNSGALTSGVHTFPAVLQSSGLYSLSSVVTVPSSSLGTQTYICNVNHKPSNTKVDKKVEPKSCDKTHTCPPCPAPEAAGGPSVFLFPPKPKDTLMISRTPEVTCVVVDVSHEDPEVKFNWYVDGVEVHNAKTKPREEQYNSTYRVVSVLTVLHQDWLNGKEYKCKVSNKALGAPIEKTISKAKGQPREPQVCTLPPSRDELTKNQVSLSCAVKGFYPSDIAVEWESNGQPENNYKTTPPVLDSDGSFFLVSKLTVDKSRWQQGNVFSCSVMHEALHNHYTQKSLSLSPGGGGGSGGGGSGGGGSGGGGSEIVLTQSPGTLSLSPGERATLSCRASQSVTSSYLAWYQQKPGQAPRLLINVGSRRATGIPDRFSGSGSGTDFTLTISRLEPEDFAVYYCQQGIMLPPTFGQGTKVEIK

SEQ ID NO: 71 - protein, 586 aa, Artificial Sequence
  CD28(SA) VHCH- Fc knob FAP(4B9) VH
QVQLVQSGAEVKKPGASVKVSCKASGYTFTSYYIHWVRQAPGQGLEWIGCIYPGNVNTNYNEKFKDRATLTVDTSISTAYMELSRLRSDDTAVYFCTRSHYGLDWNFDVWGQGTTVTVSSASTKGPSVFPLAPSSKSTSGGTAALGCLVKDYFPEPVTVSWNSGALTSGVHTFPAVLQSSGLYSLSSVVTVPSSSLGTQTYICNVNHKPSNTKVDKKVEPKSCDKTHTCPPCPAPEAAGGPSVFLFPPKPKDTLMISRTPEVTCVVVDVSHEDPEVKFNWYVDGVEVHNAKTKPREEQYNSTYRVVSVLTVLHQDWLNGKEYKCKVSNKALGAPIEKTISKAKGQPREPQVYTLPPCRDELTKNQVSLWCLVKGFYPSDIAVEWESNGQPENNYKTTPPVLDSDGSFFLYSKLTVDKSRWQQGNVFSCSVMHEALHNHYTQKSLSLSPGGGGGSGGGGSGGGGSGGGGSEVQLLESGGGLVQPGGSLRLSCAASGFTFSSYAMSWVRQAPGKGLEWVSAIIGSGASTYYADSVKGRFTISRDNSKNTLYLQMNSLRAEDTAVYYCAKGWFGGFNYWGQGTLVTVSS

SEQ ID NO: 72 - protein, 577 aa, Artificial Sequence
  CD28(SA) VHCH- Fc hole FAP(4B9) VL
QVQLVQSGAEVKKPGASVKVSCKASGYTFTSYYIHWVRQAPGQGLEWIGCIYPGNVNTNYNEKFKDRATLTVDTSISTAYMELSRLRSDDTAVYFCTRSHYGLDWNFDVWGQGTTVTVSSASTKGPSVFPLAPSSKSTSGGTAALGCLVKDYFPEPVTVSWNSGALTSGVHTFPAVLQSSGLYSLSSVVTVPSSSLGTQTYICNVNHKPSNTKVDKKVEPKSCDKTHTCPPCPAPEAAGGPSVFLFPPKPKDTLMISRTPEVTCVVVDVSHEDPEVKFNWYVDGVEVHNAKTKPREEQYNSTYRVVSVLTVLHQDWLNGKEYKCKVSNKALGAPIEKTISKAKGQPREPQVCTLPPSRDELTKNQVSLSCAVKGFYPSDIAVEWESNGQPENNYKTTPPVLDSDGSFFLVSKLTVDKSRWQQGNVFSCSVMHEALHNHYTQKSLSLSPGGGGGSGGGGSGGGGSGGGGSEIVLTQSPGTLSLSPGERATLSCRASQSVTSSYLAWYQQKPGQAPRLLINVGSRRATGIPDRFSGSGSGTDFTLTISRLEPEDFAVYYCQQGIMLPPTFGQGTKVEIK

SEQ ID NO: 73 - protein, 693 aa, Artificial Sequence
  CD28(SA) VHCH "EE"- Fc PGLALA FAP(4B9) VHCL
QVQLVQSGAEVKKPGASVKVSCKASGYTFTSYYIHWVRQAPGQGLEWIGCIYPGNVNTNYNEKFKDRATLTVDTSISTAYMELSRLRSDDTAVYFCTRSHYGLDWNFDVWGQGTTVTVSSASTKGPSVFPLAPSSKSTSGGTAALGCLVEDYFPEPVTVSWNSGALTSGVHTFPAVLQSSGLYSLSSVVTVPSSSLGTQTYICNVNHKPSNTKVDEKVEPKSCDKTHTCPPCPAPEAAGGPSVFLFPPKPKDTLMISRTPEVTCVVVDVSHEDPEVKFNWYVDGVEVHNAKTKPREEQYNSTYRVVSVLTVLHQDWLNGKEYKCKVSNKALGAPIEKTISKAKGQPREPQVYTLPPSRDELTKNQVSLTCLVKGFYPSDIAVEWESNGQPENNYKTTPPVLDSDGSFFLYSKLTVDKSRWQQGNVFSCSVMHEALHNHYTQKSLSLSPGGGGGSGGGGSGGGGSGGGGSEVQLLESGGGLVQPGGSLRLSCAASGFTFSSYAMSWVRQAPGKGLEWVSAIIGSGASTYYADSVKGRFTISRDNSKNTLYLQMNSLRAEDTAVYYCAKGWFGGFNYWGQGTLVTVSSASVAAPSVFIFPPSDEQLKSGTASVVCLLNNFYPREAKVQWKVDNALQSGNSQESVTEQDSKDSTYSLSSTLTLSKADYEKHKVYACEVTHQGLSSPVTKSFNRGEC

SEQ ID NO: 74 - protein, 214 aa, Artificial Sequence
  FAP(4B9) VLCH1
EIVLTQSPGTLSLSPGERATLSCRASQSVTSSYLAWYQQKPGQAPRLLINVGSRRATGIPDRFSGSGSGTDFTLTISRLEPEDFAVYYCQQGIMLPPTFGQGTKVEIKSSASTKGPSVFPLAPSSKSTSGGTAALGCLVKDYFPEPVTVSWNSGALTSGVHTFPAVLQSSGLYSLSSVVTVPSSSLGTQTYICNVNHKPSNTKVDKKVEPKSCD

SEQ ID NO: 75 - protein, 668 aa, Artificial Sequence
  CD28(SA) VLCH1- FAP(4B9) VHCH1 "EE"- Fc knob PGLALA
DIQMTQSPSSLSASVGDRVTITCHASQNIYVWLNWYQQKPGKAPKLLIYKASNLHTGVPSRFSGSGSGTDFTLTISSLQPEDFATYYCQQGQTYPYTFGGGTKVEIKSSASTKGPSVFPLAPSSKSTSGGTAALGCLVKDYFPEPVTVSWNSGALTSGVHTFPAVLQSSGLYSLSSVVTVPSSSLGTQTYICNVNHKPSNTKVDKKVEPKSCDGGGGSGGGGSEVQLLESGGGLVQPGGSLRLSCAASGFTFSSYAMSWVRQAPGKGLEWVSAIIGSGASTYYADSVKGRFTISRDNSKNTLYLQMNSLRAEDTAVYYCAKGWFGGFNYWGQGTLVTVSSASTKGPSVFPLAPSSKSTSGGTAALGCLVEDYFPEPVTVSWNSGALTSGVHTFPAVLQSSGLYSLSSVVTVPSSSLGTQTYICNVNHKPSNTKVDEKVEPKSCDKTHTCPPCPAPEAAGGPSVFLFPPKPKDTLMISRTPEVTCVVVDVSHEDPEVKFNWYVDGVEVHNAKTKPREEQYNSTYRVVSVLTVLHQDWLNGKEYKCKVSNKALGAPIEKTISKAKGQPREPQVYTLPPCRDELTKNQVSLWCLVKGFYPSDIAVEWESNGQPENNYKTTPPVLDSDGSFFLYSKLTVDKSRWQQGNVFSCSVMHEALHNHYTQKSLSLSP

SEQ ID NO: 76 - protein, 445 aa, Artificial Sequence
  FAP(4B9) VHCH1 "EE"- Fc hole PGLALA
EVQLLESGGGLVQPGGSLRLSCAASGFTFSSYAMSWVRQAPGKGLEWVSAIIGSGASTYYADSVKGRFTISRDNSKNTLYLQMNSLRAEDTAVYYCAKGWFGGFNYWGQGTLVTVSSASTKGPSVFPLAPSSKSTSGGTAALGCLVEDYFPEPVTVSWNSGALTSGVHTFPAVLQSSGLYSLSSVVTVPSSSLGTQTYICNVNHKPSNTKVDEKVEPKSCDKTHTCPPCPAPEAAGGPSVFLFPPKPKDTLMISRTPEVTCVVVDVSHEDPEVKFNWYVDGVEVHNAKTKPREEQYNSTYRVVSVLTVLHQDWLNGKEYKCKVSNKALGAPIEKTISKAKGQPREPQVCTLPPSRDELTKNQVSLSCAVKGFYPSDIAVEWESNGQPENNYKTTPPVLDSDGSFFLVSKLTVDKSRWQQGNVFSCSVMHEALHNHYTQKSLSLSP

SEQ ID NO: 77 - protein, 227 aa, Artificial Sequence
  CD28(SA) VHCL
QVQLVQSGAEVKKPGASVKVSCKASGYTFTSYYIHWVRQAPGQGLEWIGCIYPGNVNTNYNEKFKDRATLTVDTSISTAYMELSRLRSDDTAVYFCTRSHYGLDWNFDVWGQGTTVTVSSASVAAPSVFIFPPSDEQLKSGTASVVCLLNNFYPREAKVQWKVDNALQSGNSQESVTEQDSKDSTYSLSSTLTLSKADYEKHKVYACEVTHQGLSSPVTKSFNRGEC

SEQ ID NO: 78 - protein, 215 aa, Artificial Sequence
  FAP(4B9) VLCL "RK"
EIVLTQSPGTLSLSPGERATLSCRASQSVTSSYLAWYQQKPGQAPRLLINVGSRRATGIPDRFSGSGSGTDFTLTISRLEPEDFAVYYCQQGIMLPPTFGQGTKVEIKRTVAAPSVFIFPPSDRKLKSGTASVVCLLNNFYPREAKVQWKVDNALQSGNSQESVTEQDSKDSTYSLSSTLTLSKADYEKHKVYACEVTHQGLSSPVTKSFNRGEC

SEQ ID NO: 79 - protein, 225 aa, Artificial Sequence
  Fc hole PGLALA
DKTHTCPPCPAPEAAGGPSVFLFPPKPKDTLMISRTPEVTCVVVDVSHEDPEVKFNWYVDGVEVHNAKTKPREEQYNSTYRVVSVLTVLHQDWLNGKEYKCKVSNKALGAPIEKTISKAKGQPREPQVCTLPPSRDELTKNQVSLSCAVKGFYPSDIAVEWESNGQPENNYKTTPPVLDSDGSFFLVSKLTVDKSRWQQGNVFSCSVMHEALHNHYTQKSLSLSP

SEQ ID NO: 80 - protein, 363 aa, Artificial Sequence
  Fc knob -FAP(4B9) VH
DKTHTCPPCPAPEAAGGPSVFLFPPKPKDTLMISRTPEVTCVVVDVSHEDPEVKFNWYVDGVEVHNAKTKPREEQYNSTYRVVSVLTVLHQDWLNGKEYKCKVSNKALGAPIEKTISKAKGQPREPQVYTLPPCRDELTKNQVSLWCLVKGFYPSDIAVEWESNGQPENNYKTTPPVLDSDGSFFLYSKLTVDKSRWQQGNVFSCSVMHEALHNHYTQKSLSLSPGGGGGSGGGGSGGGGSGGGGSEVQLLESGGGLVQPGGSLRLSCAASGFTFSSYAMSWVRQAPGKGLEWVSAIIGSGASTYYADSVKGRFTISRDNSKNTLYLQMNSLRAEDTAVYYCAKGWFGGFNYWGQGTLVTVSS

SEQ ID NO: 81 - protein, 697 aa, Artificial Sequence
  CD28(SA) VHCH1 "EE"- Fc PGLALA CEA(Medi-565) VHCL
QVQLVQSGAEVKKPGASVKVSCKASGYTFTSYYIHWVRQAPGQGLEWIGCIYPGNVNTNYNEKFKDRATLTVDTSISTAYMELSRLRSDDTAVYFCTRSHYGLDWNFDVWGQGTTVTVSSASTKGPSVFPLAPSSKSTSGGTAALGCLVEDYFPEPVTVSWNSGALTSGVHTFPAVLQSSGLYSLSSVVTVPSSSLGTQTYICNVNHKPSNTKVDEKVEPKSCDKTHTCPPCPAPEAAGGPSVFLFPPKPKDTLMISRTPEVTCVVVDVSHEDPEVKFNWYVDGVEVHNAKTKPREEQYNSTYRVVSVLTVLHQDWLNGKEYKCKVSNKALGAPIEKTISKAKGQPREPQVYTLPPSRDELTKNQVSLTCLVKGFYPSDIAVEWESNGQPENNYKTTPPVLDSDGSFFLYSKLTVDKSRWQQGNVFSCSVMHEALHNHYTQKSLSLSPGGGGGSGGGGSGGGGSGGGGSEVQLVESGGGLVQPGRSLRLSCAASGFTVSSYWMHWVRQAPGKGLEWVGFIRNKANGGTTEYAASVKGRFTISRDDSKNTLYLQMNSLRAEDTAVYYCARDRGLRFYFDYWGQGTTVTVSSASVAAPSVFIFPPSDEQLKSGTASVVCLLNNFYPREAKVQWKVDNALQSGNSQESVTEQDSKDSTYSLSSTLTLSKADYEKHKVYACEVTHQGLSSPVTKSFNRGEC

SEQ ID NO: 82 - protein, 221 aa, Artificial Sequence
  CEA-VLCH1
QAVLTQPASLSASPGASASLTCTLRRGINVGAYSIYWYQQKPGSPPQYLLRYKSDSDKQQGSGVSSRFSASKDASANAGILLISGLQSEDEADYYCMIWHSGASAVFGGGTKLTVLSSASTKGPSVFPLAPSSKSTSGGTAALGCLVKDYFPEPVTVSWNSGALTSGVHTFPAVLQSSGLYSLSSVVTVPSSSLGTQTYICNVNHKPSNTKVDKKVEPKSC

SEQ ID NO: 83 - protein, 590 aa, Artificial Sequence
  CD28(SA) VHCH1- Fc knob CEA VH
QVQLVQSGAEVKKPGASVKVSCKASGYTFTSYYIHWVRQAPGQGLEWIGCIYPGNVNTNYNEKFKDRATLTVDTSISTAYMELSRLRSDDTAVYFCTRSHYGLDWNFDVWGQGTTVTVSSASTKGPSVFPLAPSSKSTSGGTAALGCLVKDYFPEPVTVSWNSGALTSGVHTFPAVLQSSGLYSLSSVVTVPSSSLGTQTYICNVNHKPSNTKVDKKVEPKSCDKTHTCPPCPAPEAAGGPSVFLFPPKPKDTLMISRTPEVTCVVVDVSHEDPEVKFNWYVDGVEVHNAKTKPREEQYNSTYRVVSVLTVLHQDWLNGKEYKCKVSNKALGAPIEKTISKAKGQPREPQVYTLPPCRDELTKNQVSLWCLVKGFYPSDIAVEWESNGQPENNYKTTPPVLDSDGSFFLYSKLTVDKSRWQQGNVFSCSVMHEALHNHYTQKSLSLSPGGGGGSGGGGSGGGGSGGGGSEVQLVESGGGLVQPGRSLRLSCAASGFTVSSYWMHWVRQAPGKGLEWVGFIRNKANGGTTEYAASVKGRFTISRDDSKNTLYLQMNSLRAEDTAVYYCARDRGLRFYFDYWGQGTTVTVSS

SEQ ID NO: 84 - protein, 585 aa, Artificial Sequence
  CD28(SA) VHCH1- Fc hole CEA VL
QVQLVQSGAEVKKPGASVKVSCKASGYTFTSYYIHWVRQAPGQGLEWIGCIYPGNVNTNYNEKFKDRATLTVDTSISTAYMELSRLRSDDTAVYFCTRSHYGLDWNFDVWGQGTTVTVSSASTKGPSVFPLAPSSKSTSGGTAALGCLVKDYFPEPVTVSWNSGALTSGVHTFPAVLQSSGLYSLSSVVTVPSSSLGTQTYICNVNHKPSNTKVDKKVEPKSCDKTHTCPPCPAPEAAGGPSVFLFPPKPKDTLMISRTPEVTCVVVDVSHEDPEVKFNWYVDGVEVHNAKTKPREEQYNSTYRVVSVLTVLHQDWLNGKEYKCKVSNKALGAPIEKTISKAKGQPREPQVCTLPPSRDELTKNQVSLSCAVKGFYPSDIAVEWESNGQPENNYKTTPPVLDSDGSFFLVSKLTVDKSRWQQGNVFSCSVMHEALHNHYTQKSLSLSPGGGGGSGGGGSGGGGSGGGGSQAVLTQPASLSASPGASASLTCTLRRGINVGAYSIYWYQQKPGSPPQYLLRYKSDSDKQQGSGVSSRFSASKDASANAGILLISGLQSEDEADYYCMIWHSGASAVFGGGTKLTVL

SEQ ID NO: 85 - protein, 448 aa, Artificial Sequence
  CD28(SA) VHCH1 "EE"- Fc hole PGLALA HYRF
QVQLVQSGAEVKKPGASVKVSCKASGYTFTSYYIHWVRQAPGQGLEWIGCIYPGNVNTNYNEKFKDRATLTVDTSISTAYMELSRLRSDDTAVYFCTRSHYGLDWNFDVWGQGTTVTVSSASTKGPSVFPLAPSSKSTSGGTAALGCLVEDYFPEPVTVSWNSGALTSGVHTFPAVLQSSGLYSLSSVVTVPSSSLGTQTYICNVNHKPSNTKVDEKVEPKSCDKTHTCPPCPAPEAAGGPSVFLFPPKPKDTLMISRTPEVTCVVVDVSHEDPEVKFNWYVDGVEVHNAKTKPREEQYNSTYRVVSVLTVLHQDWLNGKEYKCKVSNKALGAPIEKTISKAKGQPREPQVCTLPPSRDELTKNQVSLSCAVKGFYPSDIAVEWESNGQPENNYKTTPPVLDSDGSFFLVSKLTVDKSRWQQGNVFSCSVMHEALHNRFTQKSLSLSP

SEQ ID NO: 86 - protein, 225 aa, Artificial Sequence
  Fc knob PGLALA
DKTHTCPPCPAPEAAGGPSVFLFPPKPKDTLMISRTPEVTCVVVDVSHEDPEVKFNWYVDGVEVHNAKTKPREEQYNSTYRVVSVLTVLHQDWLNGKEYKCKVSNKALGAPIEKTISKAKGQPREPQVYTLPPCRDELTKNQVSLWCLVKGFYPSDIAVEWESNGQPENNYKTTPPVLDSDGSFFLYSKLTVDKSRWQQGNVFSCSVMHEALHNHYTQKSLSLSP

SEQ ID NO: 87 - protein, 446 aa, Artificial Sequence
  CEA VL-CH hu IgG1 PGLALA Fc hole
QAVLTQPASLSASPGASASLTCTLRRGINVGAYSIYWYQQKPGSPPQYLLRYKSDSDKQQGSGVSSRFSASKDASANAGILLISGLQSEDEADYYCMIWHSGASAVFGGGTKLTVLSSASTKGPSVFPLAPSSKSTSGGTAALGCLVKDYFPEPVTVSWNSGALTSGVHTFPAVLQSSGLYSLSSVVTVPSSSLGTQTYICNVNHKPSNTKVDKKVEPKSCDKTHTCPPCPAPEAAGGPSVFLFPPKPKDTLMISRTPEVTCVVVDVSHEDPEVKFNWYVDGVEVHNAKTKPREEQYNSTYRVVSVLTVLHQDWLNGKEYKCKVSNKALGAPIEKTISKAKGQPREPQVCTLPPSRDELTKNQVSLSCAVKGFYPSDIAVEWESNGQPENNYKTTPPVLDSDGSFFLVSKLTVDKSRWQQGNVFSCSVMHEALHNHYTQKSLSLSP

SEQ ID NO: 88 - protein, 228 aa, Artificial Sequence
  CEA VH-CL
EVQLVESGGGLVQPGRSLRLSCAASGFTVSSYWMHWVRQAPGKGLEWVGFIRNKANGGTTEYAASVKGRFTISRDDSKNTLYLQMNSLRAEDTAVYYCARDRGLRFYFDYWGQGTTVTVSSASVAAPSVFIFPPSDEQLKSGTASVVCLLNNFYPREAKVQWKVDNALQSGNSQESVTEQDSKDSTYSLSSTLTLSKADYEKHKVYACEVTHQGLSSPVTKSFNRGEC

SEQ ID NO: 89 - protein, 218 aa, Artificial Sequence
  CD28(mAb 9.3) light chain
DIELTQSPASLAVSLGQRATISCRASESVEYYVTSLMQWYQQKPGQPPKLLIFAASNVESGVPARFSGSGSGTNFSLNIHPVDEDDVAMYFCQQSRKVPYTFGGGTKLEIKRTVAAPSVFIFPPSDEQLKSGTASVVCLLNNFYPREAKVQWKVDNALQSGNSQESVTEQDSKDSTYSLSSTLTLSKADYEKHKVYACEVTHQGLSSPVTKSFNRGEC

SEQ ID NO: 90 - protein, 448 aa, Artificial Sequence
  CD28(mAb 9.3) hu IgG1 PGLALA heavy chain
EVKLQQSGPGLVTPSQSLSITCTVSGFSLSDYGVHWVRQSPGQGLEWLGVIWAGGGTNYNSALMSRKSISKDNSKSQVFLKMNSLQADDTAVYYCARDKGYSYYYSMDYWGQGTSVTVSSASTKGPSVFPLAPSSKSTSGGTAALGCLVKDYFPEPVTVSWNSGALTSGVHTFPAVLQSSGLYSLSSVVTVPSSSLGTQTYICNVNHKPSNTKVDKKVEPKSCDKTHTCPPCPAPEAAGGPSVFLFPPKPKDTLMISRTPEVTCVVVDVSHEDPEVKFNWYVDGVEVHNAKTKPREEQYNSTYRVVSVLTVLHQDWLNGKEYKCKVSNKALGAPIEKTISKAKGQPREPQVYTLPPSRDELTKNQVSLTCLVKGFYPSDIAVEWESNGQPENNYKTTPPVLDSDGSFFLYSKLTVDKSRWQQGNVFSCSVMHEALHNHYTQKSLSLSP

SEQ ID NO: 91 - protein, 218 aa, Artificial Sequence
  CD28(mAb 9.3) hu IgG light chain "RK"
DIELTQSPASLAVSLGQRATISCRASESVEYYVTSLMQWYQQKPGQPPKLLIFAASNVESGVPARFSGSGSGTNFSLNIHPVDEDDVAMYFCQQSRKVPYTFGGGTKLEIKRTVAAPSVFIFPPSDRKLKSGTASVVCLLNNFYPREAKVQWKVDNALQSGNSQESVTEQDSKDSTYSLSSTLTLSKADYEKHKVYACEVTHQGLSSPVTKSFNRGEC

SEQ ID NO: 92 - protein, 448 aa, Artificial Sequence
  CD28(mAb 9.3) hu IgG1 PGLALA Fc knob "EE"
EVKLQQSGPGLVTPSQSLSITCTVSGFSLSDYGVHWVRQSPGQGLEWLGVIWAGGGTNYNSALMSRKSISKDNSKSQVFLKMNSLQADDTAVYYCARDKGYSYYYSMDYWGQGTSVTVSSASTKGPSVFPLAPSSKSTSGGTAALGCLVEDYFPEPVTVSWNSGALTSGVHTFPAVLQSSGLYSLSSVVTVPSSSLGTQTYICNVNHKPSNTKVDEKVEPKSCDKTHTCPPCPAPEAAGGPSVFLFPPKPKDTLMISRTPEVTCVVVDVSHEDPEVKFNWYVDGVEVHNAKTKPREEQYNSTYRVVSVLTVLHQDWLNGKEYKCKVSNKALGAPIEKTISKAKGQPREPQVYTLPPCRDELTKNQVSLWCLVKGFYPSDIAVEWESNGQPENNYKTTPPVLDSDGSFFLYSKLTVDKSRWQQGNVFSCSVMHEALHNHYTQKSLSLSP

SEQ ID NO: 93 - protein, 820 aa, Artificial Sequence
  CD28(mAb 9.3) VHCH-VHCH Fc knob FAP(4B9) VH PGLALA
EVKLQQSGPGLVTPSQSLSITCTVSGFSLSDYGVHWVRQSPGQGLEWLGVIWAGGGTNYNSALMSRKSISKDNSKSQVFLKMNSLQADDTAVYYCARDKGYSYYYSMDYWGQGTSVTVSSASTKGPSVFPLAPSSKSTSGGTAALGCLVKDYFPEPVTVSWNSGALTSGVHTFPAVLQSSGLYSLSSVVTVPSSSLGTQTYICNVNHKPSNTKVDKKVEPKSCDGGGGSGGGGSEVKLQQSGPGLVTPSQSLSITCTVSGFSLSDYGVHWVRQSPGQGLEWLGVIWAGGGTNYNSALMSRKSISKDNSKSQVFLKMNSLQADDTAVYYCARDKGYSYYYSMDYWGQGTSVTVSSASTKGPSVFPLAPSSKSTSGGTAALGCLVKDYFPEPVTVSWNSGALTSGVHTFPAVLQSSGLYSLSSVVTVPSSSLGTQTYICNVNHKPSNTKVDKKVEPKSCDKTHTCPPCPAPEAAGGPSVFLFPPKPKDTLMISRTPEVTCVVVDVSHEDPEVKFNWYVDGVEVHNAKTKPREEQYNSTYRVVSVLTVLHQDWLNGKEYKCKVSNKALGAPIEKTISKAKGQPREPQVYTLPPCRDELTKNQVSLWCLVKGFYPSDIAVEWESNGQPENNYKTTPPVLDSDGSFFLYSKLTVDKSRWQQGNVFSCSVMHEALHNHYTQKSLSLSPGGGGGSGGGGSGGGGSGGGGSEVQLLESGGGLVQPGGSLRLSCAASGFTFSSYAMSWVRQAPGKGLEWVSAIIGSGASTYYADSVKGRFTISRDNSKNTLYLQMNSLRAEDTAVYYCAKGWFGGFNYWGQGTLVTVSS

SEQ ID NO: 94 - protein, 811 aa, Artificial Sequence
  CD28(mAb 9.3) VHCH-VHCH Fc hole FAP(4B9) VL PGLALA
EVKLQQSGPGLVTPSQSLSITCTVSGFSLSDYGVHWVRQSPGQGLEWLGVIWAGGGTNYNSALMSRKSISKDNSKSQVFLKMNSLQADDTAVYYCARDKGYSYYYSMDYWGQGTSVTVSSASTKGPSVFPLAPSSKSTSGGTAALGCLVKDYFPEPVTVSWNSGALTSGVHTFPAVLQSSGLYSLSSVVTVPSSSLGTQTYICNVNHKPSNTKVDKKVEPKSCDGGGGSGGGGSEVKLQQSGPGLVTPSQSLSITCTVSGFSLSDYGVHWVRQSPGQGLEWLGVIWAGGGTNYNSALMSRKSISKDNSKSQVFLKMNSLQADDTAVYYCARDKGYSYYYSMDYWGQGTSVTVSSASTKGPSVFPLAPSSKSTSGGTAALGCLVKDYFPEPVTVSWNSGALTSGVHTFPAVLQSSGLYSLSSVVTVPSSSLGTQTYICNVNHKPSNTKVDKKVEPKSCDKTHTCPPCPAPEAAGGPSVFLFPPKPKDTLMISRTPEVTCVVVDVSHEDPEVKFNWYVDGVEVHNAKTKPREEQYNSTYRVVSVLTVLHQDWLNGKEYKCKVSNKALGAPIEKTISKAKGQPREPQVCTLPPSRDELTKNQVSLSCAVKGFYPSDIAVEWESNGQPENNYKTTPPVLDSDGSFFLVSKLTVDKSRWQQGNVFSCSVMHEALHNHYTQKSLSLSPGGGGGSGGGGSGGGGSGGGGSEIVLTQSPGTLSLSPGERATLSCRASQSVTSSYLAWYQQKPGQAPRLLINVGSRRATGIPDRFSGSGSGTDFTLTISRLEPEDFAVYYCQQGIMLPPTFGQGTKVEIK

SEQ ID NO: 95 - protein, 586 aa, Artificial Sequence
  CD28(mAb 9.3) VHCH- Fc knob FAP(4B9) VH
EVKLQQSGPGLVTPSQSLSITCTVSGFSLSDYGVHWVRQSPGQGLEWLGVIWAGGGTNYNSALMSRKSISKDNSKSQVFLKMNSLQADDTAVYYCARDKGYSYYYSMDYWGQGTSVTVSSASTKGPSVFPLAPSSKSTSGGTAALGCLVKDYFPEPVTVSWNSGALTSGVHTFPAVLQSSGLYSLSSVVTVPSSSLGTQTYICNVNHKPSNTKVDKKVEPKSCDKTHTCPPCPAPEAAGGPSVFLFPPKPKDTLMISRTPEVTCVVVDVSHEDPEVKFNWYVDGVEVHNAKTKPREEQYNSTYRVVSVLTVLHQDWLNGKEYKCKVSNKALGAPIEKTISKAKGQPREPQVYTLPPCRDELTKNQVSLWCLVKGFYPSDIAVEWESNGQPENNYKTTPPVLDSDGSFFLYSKLTVDKSRWQQGNVFSCSVMHEALHNHYTQKSLSLSPGGGGGSGGGGSGGGGSGGGGSEVQLLESGGGLVQPGGSLRLSCAASGFTFSSYAMSWVRQAPGKGLEWVSAIIGSGASTYYADSVKGRFTISRDNSKNTLYLQMNSLRAEDTAVYYCAKGWFGGFNYWGQGTLVTVSS

SEQ ID NO: 96 - protein, 577 aa, Artificial Sequence
  CD28(mAb 9.3) VHCH- Fc hole FAP(4B9) VL
EVKLQQSGPGLVTPSQSLSITCTVSGFSLSDYGVHWVRQSPGQGLEWLGVIWAGGGTNYNSALMSRKSISKDNSKSQVFLKMNSLQADDTAVYYCARDKGYSYYYSMDYWGQGTSVTVSSASTKGPSVFPLAPSSKSTSGGTAALGCLVKDYFPEPVTVSWNSGALTSGVHTFPAVLQSSGLYSLSSVVTVPSSSLGTQTYICNVNHKPSNTKVDKKVEPKSCDKTHTCPPCPAPEAAGGPSVFLFPPKPKDTLMISRTPEVTCVVVDVSHEDPEVKFNWYVDGVEVHNAKTKPREEQYNSTYRVVSVLTVLHQDWLNGKEYKCKVSNKALGAPIEKTISKAKGQPREPQVCTLPPSRDELTKNQVSLSCAVKGFYPSDIAVEWESNGQPENNYKTTPPVLDSDGSFFLVSKLTVDKSRWQQGNVFSCSVMHEALHNHYTQKSLSLSPGGGGGSGGGGSGGGGSGGGGSEIVLTQSPGTLSLSPGERATLSCRASQSVTSSYLAWYQQKPGQAPRLLINVGSRRATGIPDRFSGSGSGTDFTLTISRLEPEDFAVYYCQQGIMLPPTFGQGTKVEIK

SEQ ID NO: 97 - protein, 693 aa, Artificial Sequence
  CD28(mAb 9.3) VHCH "EE"- Fc PGLALA FAP(4B9) VHCL
EVKLQQSGPGLVTPSQSLSITCTVSGFSLSDYGVHWVRQSPGQGLEWLGVIWAGGGTNYNSALMSRKSISKDNSKSQVFLKMNSLQADDTAVYYCARDKGYSYYYSMDYWGQGTSVTVSSASTKGPSVFPLAPSSKSTSGGTAALGCLVEDYFPEPVTVSWNSGALTSGVHTFPAVLQSSGLYSLSSVVTVPSSSLGTQTYICNVNHKPSNTKVDEKVEPKSCDKTHTCPPCPAPEAAGGPSVFLFPPKPKDTLMISRTPEVTCVVVDVSHEDPEVKFNWYVDGVEVHNAKTKPREEQYNSTYRVVSVLTVLHQDWLNGKEYKCKVSNKALGAPIEKTISKAKGQPREPQVYTLPPSRDELTKNQVSLTCLVKGFYPSDIAVEWESNGQPENNYKTTPPVLDSDGSFFLYSKLTVDKSRWQQGNVFSCSVMHEALHNHYTQKSLSLSPGGGGGSGGGGSGGGGSGGGGSEVQLLESGGGLVQPGGSLRLSCAASGFTFSSYAMSWVRQAPGKGLEWVSAIIGSGASTYYADSVKGRFTISRDNSKNTLYLQMNSLRAEDTAVYYCAKGWFGGFNYWGQGTLVTVSSASVAAPSVFIFPPSDEQLKSGTASVVCLLNNFYPREAKVQWKVDNALQSGNSQESVTEQDSKDSTYSLSSTLTLSKADYEKHKVYACEVTHQGLSSPVTKSFNRGEC

SEQ ID NO: 98 - protein, 218 aa, Artificial Sequence; identical to SEQ ID NO: 91
  CD28(mAb 9.3) VLCL "RK"

SEQ ID NO: 99 - protein, 213 aa, Artificial Sequence
  FAP(4B9) VL-CH1
EIVLTQSPGTLSLSPGERATLSCRASQSVTSSYLAWYQQKPGQAPRLLINVGSRRATGIPDRFSGSGSGTDFTLTISRLEPEDFAVYYCQQGIMLPPTFGQGTKVEIKSSASTKGPSVFPLAPSSKSTSGGTAALGCLVKDYFPEPVTVSWNSGALTSGVHTFPAVLQSSGLYSLSSVVTVPSSSLGTQTYICNVNHKPSNTKVDKKVEPKSC

SEQ ID NO: 100 - protein, 672 aa, Artificial Sequence
  CD28(mAb 9.3) VLCH1- FAP(4B9) VHCH1 "EE"- Fc knob PGLALA
DIELTQSPASLAVSLGQRATISCRASESVEYYVTSLMQWYQQKPGQPPKLLIFAASNVESGVPARFSGSGSGTNFSLNIHPVDEDDVAMYFCQQSRKVPYTFGGGTKLEIKSSASTKGPSVFPLAPSSKSTSGGTAALGCLVKDYFPEPVTVSWNSGALTSGVHTFPAVLQSSGLYSLSSVVTVPSSSLGTQTYICNVNHKPSNTKVDKKVEPKSCDGGGGSGGGGSEVQLLESGGGLVQPGGSLRLSCAASGFTFSSYAMSWVRQAPGKGLEWVSAIIGSGASTYYADSVKGRFTISRDNSKNTLYLQMNSLRAEDTAVYYCAKGWFGGFNYWGQGTLVTVSSASTKGPSVFPLAPSSKSTSGGTAALGCLVEDYFPEPVTVSWNSGALTSGVHTFPAVLQSSGLYSLSSVVTVPSSSLGTQTYICNVNHKPSNTKVDEKVEPKSCDKTHTCPPCPAPEAAGGPSVFLFPPKPKDTLMISRTPEVTCVVVDVSHEDPEVKFNWYVDGVEVHNAKTKPREEQYNSTYRVVSVLTVLHQDWLNGKEYKCKVSNKALGAPIEKTISKAKGQPREPQVYTLPPCRDELTKNQVSLWCLVKGFYPSDIAVEWESNGQPENNYKTTPPVLDSDGSFFLYSKLTVDKSRWQQGNVFSCSVMHEALHNHYTQKSLSLSP

SEQ ID NO: 101 - protein, 227 aa, Artificial Sequence
  CD28(mAb 9.3) VHCL
EVKLQQSGPGLVTPSQSLSITCTVSGFSLSDYGVHWVRQSPGQGLEWLGVIWAGGGTNYNSALMSRKSISKDNSKSQVFLKMNSLQADDTAVYYCARDKGYSYYYSMDYWGQGTSVTVSSASVAAPSVFIFPPSDEQLKSGTASVVCLLNNFYPREAKVQWKVDNALQSGNSQESVTEQDSKDSTYSLSSTLTLSKADYEKHKVYACEVTHQGLSSPVTKSFNRGEC

SEQ ID NO: 102 - protein, 697 aa, Artificial Sequence
  CD28(mAb 9.3) VHCH1 "EE"- Fc PGLALA CEA VHCL
EVKLQQSGPGLVTPSQSLSITCTVSGFSLSDYGVHWVRQSPGQGLEWLGVIWAGGGTNYNSALMSRKSISKDNSKSQVFLKMNSLQADDTAVYYCARDKGYSYYYSMDYWGQGTSVTVSSASTKGPSVFPLAPSSKSTSGGTAALGCLVEDYFPEPVTVSWNSGALTSGVHTFPAVLQSSGLYSLSSVVTVPSSSLGTQTYICNVNHKPSNTKVDEKVEPKSCDKTHTCPPCPAPEAAGGPSVFLFPPKPKDTLMISRTPEVTCVVVDVSHEDPEVKFNWYVDGVEVHNAKTKPREEQYNSTYRVVSVLTVLHQDWLNGKEYKCKVSNKALGAPIEKTISKAKGQPREPQVYTLPPSRDELTKNQVSLTCLVKGFYPSDIAVEWESNGQPENNYKTTPPVLDSDGSFFLYSKLTVDKSRWQQGNVFSCSVMHEALHNHYTQKSLSLSPGGGGGSGGGGSGGGGSGGGGSEVQLVESGGGLVQPGRSLRLSCAASGFTVSSYWMHWVRQAPGKGLEWVGFIRNKANGGTTEYAASVKGRFTISRDDSKNTLYLQMNSLRAEDTAVYYCARDRGLRFYFDYWGQGTTVTVSSASVAAPSVFIFPPSDEQLKSGTASVVCLLNNFYPREAKVQWKVDNALQSGNSQESVTEQDSKDSTYSLSSTLTLSKADYEKHKVYACEVTHQGLSSPVTKSFNRGEC

SEQ ID NO: 103 - protein, 590 aa, Artificial Sequence
  CD28(mAb 9.3) VHCH1- Fc knob CEA VH
EVKLQQSGPGLVTPSQSLSITCTVSGFSLSDYGVHWVRQSPGQGLEWLGVIWAGGGTNYNSALMSRKSISKDNSKSQVFLKMNSLQADDTAVYYCARDKGYSYYYSMDYWGQGTSVTVSSASTKGPSVFPLAPSSKSTSGGTAALGCLVKDYFPEPVTVSWNSGALTSGVHTFPAVLQSSGLYSLSSVVTVPSSSLGTQTYICNVNHKPSNTKVDKKVEPKSCDKTHTCPPCPAPEAAGGPSVFLFPPKPKDTLMISRTPEVTCVVVDVSHEDPEVKFNWYVDGVEVHNAKTKPREEQYNSTYRVVSVLTVLHQDWLNGKEYKCKVSNKALGAPIEKTISKAKGQPREPQVYTLPPCRDELTKNQVSLWCLVKGFYPSDIAVEWESNGQPENNYKTTPPVLDSDGSFFLYSKLTVDKSRWQQGNVFSCSVMHEALHNHYTQKSLSLSPGGGGGSGGGGSGGGGSGGGGSEVQLVESGGGLVQPGRSLRLSCAASGFTVSSYWMHWVRQAPGKGLEWVGFIRNKANGGTTEYAASVKGRFTISRDDSKNTLYLQMNSLRAEDTAVYYCARDRGLRFYFDYWGQGTTVTVSS

SEQ ID NO: 104 - protein, 585 aa, Artificial Sequence
  CD28(mAb 9.3) VHCH1- Fc hole CEA VL
EVKLQQSGPGLVTPSQSLSITCTVSGFSLSDYGVHWVRQSPGQGLEWLGVIWAGGGTNYNSALMSRKSISKDNSKSQVFLKMNSLQADDTAVYYCARDKGYSYYYSMDYWGQGTSVTVSSASTKGPSVFPLAPSSKSTSGGTAALGCLVKDYFPEPVTVSWNSGALTSGVHTFPAVLQSSGLYSLSSVVTVPSSSLGTQTYICNVNHKPSNTKVDKKVEPKSCDKTHTCPPCPAPEAAGGPSVFLFPPKPKDTLMISRTPEVTCVVVDVSHEDPEVKFNWYVDGVEVHNAKTKPREEQYNSTYRVVSVLTVLHQDWLNGKEYKCKVSNKALGAPIEKTISKAKGQPREPQVCTLPPSRDELTKNQVSLSCAVKGFYPSDIAVEWESNGQPENNYKTTPPVLDSDGSFFLVSKLTVDKSRWQQGNVFSCSVMHEALHNHYTQKSLSLSPGGGGGSGGGGSGGGGSGGGGSQAVLTQPASLSASPGASASLTCTLRRGINVGAYSIYWYQQKPGSPPQYLLRYKSDSDKQQGSGVSSRFSASKDASANAGILLISGLQSEDEADYYCMIWHSGASAVFGGGTKLTVL

SEQ ID NO: 105 - protein, 448 aa, Artificial Sequence
  CD28(mAb 9.3) VHCH1 "EE"- Fc hole PGLALA HYRF
EVKLQQSGPGLVTPSQSLSITCTVSGFSLSDYGVHWVRQSPGQGLEWLGVIWAGGGTNYNSALMSRKSISKDNSKSQVFLKMNSLQADDTAVYYCARDKGYSYYYSMDYWGQGTSVTVSSASTKGPSVFPLAPSSKSTSGGTAALGCLVEDYFPEPVTVSWNSGALTSGVHTFPAVLQSSGLYSLSSVVTVPSSSLGTQTYICNVNHKPSNTKVDEKVEPKSCDKTHTCPPCPAPEAAGGPSVFLFPPKPKDTLMISRTPEVTCVVVDVSHEDPEVKFNWYVDGVEVHNAKTKPREEQYNSTYRVVSVLTVLHQDWLNGKEYKCKVSNKALGAPIEKTISKAKGQPREPQVCTLPPSRDELTKNQVSLSCAVKGFYPSDIAVEWESNGQPENNYKTTPPVLDSDGSFFLVSKLTVDKSRWQQGNVFSCSVMHEALHNHYTQKSLSLSP

SEQ ID NO: 106 - protein, 218 aa, Artificial Sequence; identical to SEQ ID NO: 91
  CD28(mAb 9.3) VLCL "RK"

SEQ ID NO: 107 - protein, 834 aa, Artificial Sequence
  CD28(SA) VHCH1 "EE" Fc hole PGLALA FAP(4B9) VH - CEA(Medi-565) VHCL
QVQLVQSGAEVKKPGASVKVSCKASGYTFTSYYIHWVRQAPGQGLEWIGCIYPGNVNTNYNEKFKDRATLTVDTSISTAYMELSRLRSDDTAVYFCTRSHYGLDWNFDVWGQGTTVTVSSASTKGPSVFPLAPSSKSTSGGTAALGCLVEDYFPEPVTVSWNSGALTSGVHTFPAVLQSSGLYSLSSVVTVPSSSLGTQTYICNVNHKPSNTKVDEKVEPKSCDKTHTCPPCPAPEAAGGPSVFLFPPKPKDTLMISRTPEVTCVVVDVSHEDPEVKFNWYVDGVEVHNAKTKPREEQYNSTYRVVSVLTVLHQDWLNGKEYKCKVSNKALGAPIEKTISKAKGQPREPQVYTLPPCRDELTKNQVSLWCLVKGFYPSDIAVEWESNGQPENNYKTTPPVLDSDGSFFLYSKLTVDKSRWQQGNVFSCSVMHEALHNHYTQKSLSLSPGGGGGSGGGGSGGGGSGGGGSEVQLLESGGGLVQPGGSLRLSCAASGFTFSSYAMSWVRQAPGKGLEWVSAIIGSGASTYYADSVKGRFTISRDNSKNTLYLQMNSLRAEDTAVYYCAKGWFGGFNYWGQGTLVTVSSGGGGSGGGGSGGGGSGGGGSEVQLVESGGGLVQPGRSLRLSCAASGFTVSSYWMHWVRQAPGKGLEWVGFIRNKANGGTTEYAASVKGRFTISRDDSKNTLYLQMNSLRAEDTAVYYCARDRGLRFYFDYWGQGTTVTVSSASVAAPSVFIFPPSDEQLKSGTASVVCLLNNFYPREAKVQWKVDNALQSGNSQESVTEQDSKDSTYSLSSTLTLSKADYEKHKVYACEVTHQGLSSPVTKSFNRGEC

SEQ ID NO: 108 - protein, 577 aa, Artificial Sequence
  CD28(SA) VHCH1 "EE" Fc knob PGLALA FAP(4B9) VL
QVQLVQSGAEVKKPGASVKVSCKASGYTFTSYYIHWVRQAPGQGLEWIGCIYPGNVNTNYNEKFKDRATLTVDTSISTAYMELSRLRSDDTAVYFCTRSHYGLDWNFDVWGQGTTVTVSSASTKGPSVFPLAPSSKSTSGGTAALGCLVEDYFPEPVTVSWNSGALTSGVHTFPAVLQSSGLYSLSSVVTVPSSSLGTQTYICNVNHKPSNTKVDEKVEPKSCDKTHTCPPCPAPEAAGGPSVFLFPPKPKDTLMISRTPEVTCVVVDVSHEDPEVKFNWYVDGVEVHNAKTKPREEQYNSTYRVVSVLTVLHQDWLNGKEYKCKVSNKALGAPIEKTISKAKGQPREPQVCTLPPSRDELTKNQVSLSCAVKGFYPSDIAVEWESNGQPENNYKTTPPVLDSDGSFFLVSKLTVDKSRWQQGNVFSCSVMHEALHNHYTQKSLSLSPGGGGGSGGGGSGGGGSGGGGSEIVLTQSPGTLSLSPGERATLSCRASQSVTSSYLAWYQQKPGQAPRLLINVGSRRATGIPDRFSGSGSGTDFTLTISRLEPEDFAVYYCQQGIMLPPTFGQGTKVEIK

SEQ ID NO: 109 - protein, 221 aa, Artificial Sequence; identical to SEQ ID NO: 82
  CEA VLCH1

SEQ ID NO: 110 - protein, 727 aa, Artificial Sequence
  CD28(SA) VHCH1 Fc hole PGLALA FAP(4B9) VH - CEA VH
QVQLVQSGAEVKKPGASVKVSCKASGYTFTSYYIHWVRQAPGQGLEWIGCIYPGNVNTNYNEKFKDRATLTVDTSISTAYMELSRLRSDDTAVYFCTRSHYGLDWNFDVWGQGTTVTVSSASTKGPSVFPLAPSSKSTSGGTAALGCLVKDYFPEPVTVSWNSGALTSGVHTFPAVLQSSGLYSLSSVVTVPSSSLGTQTYICNVNHKPSNTKVDKKVEPKSCDKTHTCPPCPAPEAAGGPSVFLFPPKPKDTLMISRTPEVTCVVVDVSHEDPEVKFNWYVDGVEVHNAKTKPREEQYNSTYRVVSVLTVLHQDWLNGKEYKCKVSNKALGAPIEKTISKAKGQPREPQVYTLPPCRDELTKNQVSLWCLVKGFYPSDIAVEWESNGQPENNYKTTPPVLDSDGSFFLYSKLTVDKSRWQQGNVFSCSVMHEALHNHYTQKSLSLSPGGGGGSGGGGSGGGGSGGGGSEVQLLESGGGLVQPGGSLRLSCAASGFTFSSYAMSWVRQAPGKGLEWVSAIIGSGASTYYADSVKGRFTISRDNSKNTLYLQMNSLRAEDTAVYYCAKGWFGGFNYWGQGTLVTVSSGGGGSGGGGSGGGGSGGGGSEVQLVESGGGLVQPGRSLRLSCAASGFTVSSYWMHWVRQAPGKGLEWVGFIRNKANGGTTEYAASVKGRFTISRDDSKNTLYLQMNSLRAEDTAVYYCARDRGLRFYFDYWGQGTTVTVSS

SEQ ID NO: 111 - protein, 713 aa, Artificial Sequence
  CD28(SA) VHCH1 Fc knob PGLALA FAP(4B9) VL - CEA VL
QVQLVQSGAEVKKPGASVKVSCKASGYTFTSYYIHWVRQAPGQGLEWIGCIYPGNVNTNYNEKFKDRATLTVDTSISTAYMELSRLRSDDTAVYFCTRSHYGLDWNFDVWGQGTTVTVSSASTKGPSVFPLAPSSKSTSGGTAALGCLVKDYFPEPVTVSWNSGALTSGVHTFPAVLQSSGLYSLSSVVTVPSSSLGTQTYICNVNHKPSNTKVDKKVEPKSCDKTHTCPPCPAPEAAGGPSVFLFPPKPKDTLMISRTPEVTCVVVDVSHEDPEVKFNWYVDGVEVHNAKTKPREEQYNSTYRVVSVLTVLHQDWLNGKEYKCKVSNKALGAPIEKTISKAKGQPREPQVCTLPPSRDELTKNQVSLSCAVKGFYPSDIAVEWESNGQPENNYKTTPPVLDSDGSFFLVSKLTVDKSRWQQGNVFSCSVMHEALHNHYTQKSLSLSPGGGGGSGGGGSGGGGSGGGGSEIVLTQSPGTLSLSPGERATLSCRASQSVTSSYLAWYQQKPGQAPRLLINVGSRRATGIPDRFSGSGSGTDFTLTISRLEPEDFAVYYCQQGIMLPPTFGQGTKVEIKGGGGSGGGGSGGGGSGGGGSQAVLTQPASLSASPGASASLTCTLRRGINVGAYSIYWYQQKPGSPPQYLLRYKSDSDKQQGSGVSSRFSASKDASANAGILLISGLQSEDEADYYCMIWHSGASAVFGGGTKLTVL

SEQ ID NO: 112 - protein, 448 aa, Artificial Sequence; identical to SEQ ID NO: 66
  VH (CD28 parental) CH1- Fc knob PGLALA

SEQ ID NO: 113 - protein, 448 aa, Artificial Sequence
  VH (CD28 variant g) CH1- Fc knob PGLALA
QVQLVQSGAEVKKPGASVKVSCKASGYTFTSYYIHWVRQAPGQGLEWIGSIYPRNVQTNYNEKFKDRATLTVDTSISTAYMELSRLRSDDTAVYFCTRSHYGLDHNFDVWGQGTTVTVSSASTKGPSVFPLAPSSKSTSGGTAALGCLVEDYFPEPVTVSWNSGALTSGVHTFPAVLQSSGLYSLSSVVTVPSSSLGTQTYICNVNHKPSNTKVDEKVEPKSCDKTHTCPPCPAPEAAGGPSVFLFPPKPKDTLMISRTPEVTCVVVDVSHEDPEVKFNWYVDGVEVHNAKTKPREEQYNSTYRVVSVLTVLHQDWLNGKEYKCKVSNKALGAPIEKTISKAKGQPREPQVYTLPPCRDELTKNQVSLWCLVKGFYPSDIAVEWESNGQPENNYKTTPPVLDSDGSFFLYSKLTVDKSRWQQGNVFSCSVMHEALHNHYTQKSLSLSP

SEQ ID NO: 114 - protein, 448 aa, Artificial Sequence
  VH (CD28 variant f) CH1- Fc knob PGLALA
QVQLVQSGAEVKKPGASVKVSCKASGYTFTSYYIHWVRQAPGQGLEWIGSIYPGNVQTNYNEKFKDRATLTVDTSISTAYMELSRLRSDDTAVYFCTRSHYGLDFNFDVWGQGTTVTVSSASTKGPSVFPLAPSSKSTSGGTAALGCLVEDYFPEPVTVSWNSGALTSGVHTFPAVLQSSGLYSLSSVVTVPSSSLGTQTYICNVNHKPSNTKVDEKVEPKSCDKTHTCPPCPAPEAAGGPSVFLFPPKPKDTLMISRTPEVTCVVVDVSHEDPEVKFNWYVDGVEVHNAKTKPREEQYNSTYRVVSVLTVLHQDWLNGKEYKCKVSNKALGAPIEKTISKAKGQPREPQVYTLPPCRDELTKNQVSLWCLVKGFYPSDIAVEWESNGQPENNYKTTPPVLDSDGSFFLYSKLTVDKSRWQQGNVFSCSVMHEALHNHYTQKSLSLSP

SEQ ID NO: 115 - protein, 448 aa, Artificial Sequence
  VH (CD28 variant j) CH1- Fc knob PGLALA
EVQLVESGGGLVQPGGSLRLSCAASGFTFTSYYIHWVRQAPGKGLEWVASIYPGNVATRYADSVKGRFTISADTSKNTAYLQMNSLRAEDTAVYYCTRSHYGLDWNFDVWGQGTTVTVSSASTKGPSVFPLAPSSKSTSGGTAALGCLVEDYFPEPVTVSWNSGALTSGVHTFPAVLQSSGLYSLSSVVTVPSSSLGTQTYICNVNHKPSNTKVDEKVEPKSCDKTHTCPPCPAPEAAGGPSVFLFPPKPKDTLMISRTPEVTCVVVDVSHEDPEVKFNWYVDGVEVHNAKTKPREEQYNSTYRVVSVLTVLHQDWLNGKEYKCKVSNKALGAPIEKTISKAKGQPREPQVYTLPPCRDELTKNQVSLWCLVKGFYPSDIAVEWESNGQPENNYKTTPPVLDSDGSFFLYSKLTVDKSRWQQGNVFSCSVMHEALHNHYTQKSLSLSP

SEQ ID NO: 116 - protein, 448 aa, Artificial Sequence
  VH (CD28 variant e) CH1- Fc knob PGLALA
QVQLVQSGAEVKKPGASVKVSCKASGYTFTSYYIHWVRQAPGQGLEWIGSIYPGNVQTNYNEKFKDRATLTVDTSISTAYMELSRLRSDDTAVYFCTRSHYGLDWNFDVWGQGTTVTVSSASTKGPSVFPLAPSSKSTSGGTAALGCLVEDYFPEPVTVSWNSGALTSGVHTFPAVLQSSGLYSLSSVVTVPSSSLGTQTYICNVNHKPSNTKVDEKVEPKSCDKTHTCPPCPAPEAAGGPSVFLFPPKPKDTLMISRTPEVTCVVVDVSHEDPEVKFNWYVDGVEVHNAKTKPREEQYNSTYRVVSVLTVLHQDWLNGKEYKCKVSNKALGAPIEKTISKAKGQPREPQVYTLPPCRDELTKNQVSLWCLVKGFYPSDIAVEWESNGQPENNYKTTPPVLDSDGSFFLYSKLTVDKSRWQQGNVFSCSVMHEALHNHYTQKSLSLSP

SEQ ID NO: 117 - protein, 448 aa, Artificial Sequence
  VH (CD28 variant b) CH1- Fc knob PGLALA
QVQLVQSGAEVKKPGASVKVSCKASGYTFTSYYIHWVRQAPGQGLEWIGSIYPGNVQTNYNEKFKDRATLTVDTSISTAYMELSRLRSDDTAVYFCTRSHYGLDHNFDVWGQGTTVTVSSASTKGPSVFPLAPSSKSTSGGTAALGCLVEDYFPEPVTVSWNSGALTSGVHTFPAVLQSSGLYSLSSVVTVPSSSLGTQTYICNVNHKPSNTKVDEKVEPKSCDKTHTCPPCPAPEAAGGPSVFLFPPKPKDTLMISRTPEVTCVVVDVSHEDPEVKFNWYVDGVEVHNAKTKPREEQYNSTYRVVSVLTVLHQDWLNGKEYKCKVSNKALGAPIEKTISKAKGQPREPQVYTLPPCRDELTKNQVSLWCLVKGFYPSDIAVEWESNGQPENNYKTTPPVLDSDGSFFLYSKLTVDKSRWQQGNVFSCSVMHEALHNHYTQKSLSLSP

SEQ ID NO: 118 - protein, 448 aa, Artificial Sequence
  VH (CD28 variant a) CH1- Fc knob PGLALA
QVQLVQSGAEVKKPGASVKVSCKASGYTFTSYYIHWVRQAPGQGLEWIGSIYPGNVNTNYNEKFKDRATLTVDTSISTAYMELSRLRSDDTAVYFCTRSHYGLDWNFDVWGQGTTVTVSSASTKGPSVFPLAPSSKSTSGGTAALGCLVEDYFPEPVTVSWNSGALTSGVHTFPAVLQSSGLYSLSSVVTVPSSSLGTQTYICNVNHKPSNTKVDEKVEPKSCDKTHTCPPCPAPEAAGGPSVFLFPPKPKDTLMISRTPEVTCVVVDVSHEDPEVKFNWYVDGVEVHNAKTKPREEQYNSTYRVVSVLTVLHQDWLNGKEYKCKVSNKALGAPIEKTISKAKGQPREPQVYTLPPCRDELTKNQVSLWCLVKGFYPSDIAVEWESNGQPENNYKTTPPVLDSDGSFFLYSKLTVDKSRWQQGNVFSCSVMHEALHNHYTQKSLSLSP

SEQ ID NO: 119 - protein, 448 aa, Artificial Sequence
  VH (CD28 variant i) CH1- Fc knob PGLALA
EVQLVESGGGLVQPGGSLRLSCAASGFTFTSYYIHWVRQAPGKGLEWVASIYPGNVNTRYADSVKGRFTISADTSKNTAYLQMNSLRAEDTAVYYCTRSHYGLDWNFDVWGQGTTVTVSSASTKGPSVFPLAPSSKSTSGGTAALGCLVEDYFPEPVTVSWNSGALTSGVHTFPAVLQSSGLYSLSSVVTVPSSSLGTQTYICNVNHKPSNTKVDEKVEPKSCDKTHTCPPCPAPEAAGGPSVFLFPPKPKDTLMISRTPEVTCVVVDVSHEDPEVKFNWYVDGVEVHNAKTKPREEQYNSTYRVVSVLTVLHQDWLNGKEYKCKVSNKALGAPIEKTISKAKGQPREPQVYTLPPCRDELTKNQVSLWCLVKGFYPSDIAVEWESNGQPENNYKTTPPVLDSDGSFFLYSKLTVDKSRWQQGNVFSCSVMHEALHNHYTQKSLSLSP

SEQ ID NO: 120 - protein, 214 aa, Artificial Sequence
  VL (CD28 variant k)-CL
DIQMTQSPSSLSASVGDRVTITCHASQNIYVHLNWYQQKPGKAPKLLIYKASNLHTGVPSRFSGSGSGTDFTLTISSLQPEDFATYYCQQAQTYPYTFGGGTKVEIKRTVAAPSVFIFPPSDRKLKSGTASVVCLLNNFYPREAKVQWKVDNALQSGNSQESVTEQDSKDSTYSLSSTLTLSKADYEKHKVYACEVTHQGLSSPVTKSFNRGEC

SEQ ID NO: 121 - protein, 214 aa, Artificial Sequence
  VL (CD28 variant l)-CL
DIQMTQSPSSLSASVGDRVTITCHASQNIYVFLNWYQQKPGKAPKLLIYKASNLHTGVPSRFSGSGSGTDFTLTISSLQPEDFATYYCQQGQTYPYTFGGGTKVEIKRTVAAPSVFIFPPSDRKLKSGTASVVCLLNNFYPREAKVQWKVDNALQSGNSQESVTEQDSKDSTYSLSSTLTLSKADYEKHKVYACEVTHQGLSSPVTKSFNRGEC

SEQ ID NO: 122 - protein, 214 aa, Artificial Sequence
  VL (CD28 variant m)-CL
DIQMTQSPSSLSASVGDRVTITCHASQNIYVYLNWYQQKPGKAPKLLIYKASNLHTGVPSRFSGSGSGTDFTLTISSLQPEDFATYYCQQGQTYPYTFGGGTKVEIKRTVAAPSVFIFPPSDRKLKSGTASVVCLLNNFYPREAKVQWKVDNALQSGNSQESVTEQDSKDSTYSLSSTLTLSKADYEKHKVYACEVTHQGLSSPVTKSFNRGEC

SEQ ID NO: 123 - protein, 214 aa, Artificial Sequence
  VL (CD28 variant r)-CL
DIQMTQSPSSLSASVGDRVTITCHASQGIYVYLNWYQQKPGKAPKLLIYKASNLHTGVPSRFSGSGSGTDFTLTISSLQPEDFATYYCQQGQTYPYTFGGGTKVEIKRTVAAPSVFIFPPSDRKLKSGTASVVCLLNNFYPREAKVQWKVDNALQSGNSQESVTEQDSKDSTYSLSSTLTLSKADYEKHKVYACEVTHQGLSSPVTKSFNRGEC

SEQ ID NO: 124 - protein, 214 aa, Artificial Sequence
  VL (CD28 variant s)-CL
DIQMTQSPSSLSASVGDRVTITCHASQGISVYLNWYQQKPGKAPKLLIYKASNLHTGVPSRFSGSGSGTDFTLTISSLQPEDFATYYCQQGQTYPYTFGGGTKVEIKRTVAAPSVFIFPPSDRKLKSGTASVVCLLNNFYPREAKVQWKVDNALQSGNSQESVTEQDSKDSTYSLSSTLTLSKADYEKHKVYACEVTHQGLSSPVTKSFNRGEC

SEQ ID NO: 125 - protein, 214 aa, Artificial Sequence
  VL (CD28 variant t)-CL
DIQMTQSPSSLSASVGDRVTITCRASQNIYVWLNWYQQKPGKAPKLLIYKASNLYSGVPSRFSGSRSGTDFTLTISSLQPEDFATYYCQQGQTYPYTFGQGTKLEIKRTVAAPSVFIFPPSDRKLKSGTASVVCLLNNFYPREAKVQWKVDNALQSGNSQESVTEQDSKDSTYSLSSTLTLSKADYEKHKVYACEVTHQGLSSPVTKSFNRGEC

SEQ ID NO: 126 - protein, 225 aa, Artificial Sequence
  Fc hole PGLALA, HYRF
DKTHTCPPCPAPEAAGGPSVFLFPPKPKDTLMISRTPEVTCVVVDVSHEDPEVKFNWYVDGVEVHNAKTKPREEQYNSTYRVVSVLTVLHQDWLNGKEYKCKVSNKALGAPIEKTISKAKGQPREPQVCTLPPSRDELTKNQVSLSCAVKGFYPSDIAVEWESNGQPENNYKTTPPVLDSDGSFFLVSKLTVDKSRWQQGNVFSCSVMHEALHNRFTQKSLSLSP

SEQ ID NO: 127 - protein, 5 aa, Artificial Sequence
  CEA CDR-H1
SYWMH

SEQ ID NO: 128 - protein, 19 aa, Artificial Sequence
  CEA CDR-H2
FIRNKANGGTTEYAASVKG

SEQ ID NO: 129 - protein, 10 aa, Artificial Sequence
  CEA CDR-H3
DRGLRFYFDY

SEQ ID NO: 130 - protein, 14 aa, Artificial Sequence
  CEA CDR-L1
TLRRGINVGAYSIY

SEQ ID NO: 131 - protein, 13 aa, Artificial Sequence
  CEA CDR-L2
YKSDSDKQQGSGV

SEQ ID NO: 132 - protein, 10 aa, Artificial Sequence
  CEA CDR-L3
MIWHSGASAV

SEQ ID NO: 133 - protein, 121 aa, Artificial Sequence
  CEA VH
EVQLVESGGGLVQPGRSLRLSCAASGFTVSSYWMHWVRQAPGKGLEWVGFIRNKANGGTTEYAASVKGRFTISRDDSKNTLYLQMNSLRAEDTAVYYCARDRGLRFYFDYWGQGTTVTVSS

SEQ ID NO: 134 - protein, 116 aa, Artificial Sequence
  CEA VL
QAVLTQPASLSASPGASASLTCTLRRGINVGAYSIYWYQQKPGSPPQYLLRYKSDSDKQQGSGVSSRFSASKDASANAGILLISGLQSEDEADYYCMIWHSGASAVFGGGTKLTVL

SEQ ID NO: 135 - protein, 748 aa, Artificial Sequence
  His-tagged human FAP ECD
RPSRVHNSEENTMRALTLKDILNGTFSYKTFFPNWISGQEYLHQSADNNIVLYNIETGQSYTILSNRTMKSVNASNYGLSPDRQFVYLESDYSKLWRYSYTATYYIYDLSNGEFVRGNELPRPIQYLCWSPVGSKLAYVYQNNIYLKQRPGDPPFQITFNGRENKIFNGIPDWVYEEEMLATKYALWWSPNGKFLAYAEFNDTDIPVIAYSYYGDEQYPRTINIPYPKAGAKNPVVRIFIIDTTYPAYVGPQEVPVPAMIASSDYYFSWLTWVTDERVCLQWLKRVQNVSVLSICDFREDWQTWDCPKTQEHIEESRTGWAGGFFVSTPVFSYDAISYYKIFSDKDGYKHIHYIKDTVENAIQITSGKWEAINIFRVTQDSLFYSSNEFEEYPGRRNIYRISIGSYPPSKKCVTCHLRKERCQYYTASFSDYAKYYALVCYGPGIPISTLHDGRTDQEIKILEENKELENALKNIQLPKEEIKKLEVDEITLWYKMILPPQFDRSKKYPLLIQVYGGPCSQSVRSVFAVNWISYLASKEGMVIALVDGRGTAFQGDKLLYAVYRKLGVYEVEDQITAVRKFIEMGFIDEKRIAIWGWSYGGYVSSLALASGTGLFKCGIAVAPVSSWEYYASVYTERFMGLPTKDDNLEHYKNSTVMARAEYFRNVDYLLIHGTADDNVHFQNSAQIAKALVNAQVDFQAMWYSDQNHGLSGLSTNHLYTHMTHFLKQCFSLSDGKKKKKKGHHHHHH

SEQ ID NO: 136 - protein, 761 aa, murine
MKTWLKTVFGVTTLAALALVVICIVLRPSRVYKPEGNTKRALTLKDILNGTFSYKTYFPNWISEQEYLHQSEDDNIVFYNIETRESYIILSNSTMKSVNATDYGLSPDRQFVYLESDYSKLWRYSYTATYYIYDLQNGEFVRGYELPRPIQYLCWSPVGSKLAYVYQNNIYLKQRPGDPPFQITYTGRENRIFNGIPDWVYEEEMLATKYALWWSPDGKFLAYVEFNDSDIPIIAYSYYGDGQYPRTINIPYPKAGAKNPVVRVFIVDTTYPHHVGPMEVPVPEMIASSDYYFSWLTWVSSERVCLQWLKRVQNVSVLSICDFREDWHAWECPKNQEHVEESRTGWAGGFFVSTPAFSQDATSYYKIFSDKDGYKHIHYIKDTVENAIQITSGKWEAIYIFRVTQDSLFYSSNEFEGYPGRRNIYRISIGNSPPSKKCVTCHLRKERCQYYTASFSYKAKYYALVCYGPGLPISTLHDGRTDQEIQVLEENKELENSLRNIQLPKVEIKKLKDGGLTFWYKMILPPQFDRSKKYPLLIQVYGGPCSQSVKSVFAVNWITYLASKEGIVIALVDGRGTAFQGDKFLHAVYRKLGVYEVEDQLTAVRKFIEMGFIDEERIAIWGWSYGGYVSSLALASGTGLFKCGIAVAPVSSWEYYASIYSERFMGLPTKDDNLEHYKNSTVMARAEYFRNVDYLLIHGTADDNVHFQNSAQIAKALVNAQVDFQAMWYSDQNHGISSGRSQNHLYTHMTHFLKQCFSLSD

SEQ ID NO: 137 - protein, 749 aa, Artificial Sequence
  Murine FAP ectodomain+poly-lys-tag+his6-tag
RPSRVYKPEGNTKRALTLKDILNGTFSYKTYFPNWISEQEYLHQSEDDNIVFYNIETRESYIILSNSTMKSVNATDYGLSPDRQFVYLESDYSKLWRYSYTATYYIYDLQNGEFVRGYELPRPIQYLCWSPVGSKLAYVYQNNIYLKQRPGDPPFQITYTGRENRIFNGIPDWVYEEEMLATKYALWWSPDGKFLAYVEFNDSDIPIIAYSYYGDGQYPRTINIPYPKAGAKNPVVRVFIVDTTYPHHVGPMEVPVPEMIASSDYYFSWLTWVSSERVCLQWLKRVQNVSVLSICDFREDWHAWECPKNQEHVEESRTGWAGGFFVSTPAFSQDATSYYKIFSDKDGYKHIHYIKDTVENAIQITSGKWEAIYIFRVTQDSLFYSSNEFEGYPGRRNIYRISIGNSPPSKKCVTCHLRKERCQYYTASFSYKAKYYALVCYGPGLPISTLHDGRTDQEIQVLEENKELENSLRNIQLPKVEIKKLKDGGLTFWYKMILPPQFDRSKKYPLLIQVYGGPCSQSVKSVFAVNWITYLASKEGIVIALVDGRGTAFQGDKFLHAVYRKLGVYEVEDQLTAVRKFIEMGFIDEERIAIWGWSYGGYVSSLALASGTGLFKCGIAVAPVSSWEYYASIYSERFMGLPTKDDNLEHYKNSTVMARAEYFRNVDYLLIHGTADDNVHFQNSAQIAKALVNAQVDFQAMWYSDQNHGILSGRSQNHLYTHMTHFLKQCFSLSDGKKKKKKGHHHHHH

SEQ ID NO: 138 - protein, 748 aa, Artificial Sequence
  Cynomolgus FAP ectodomain+poly-lys-tag+his6-tag
RPPRVHNSEENTMRALTLKDILNGTFSYKTFFPNWISGQEYLHQSADNNIVLYNIETGQSYTILSNRTMKSVNASNYGLSPDRQFVYLESDYSKLWRYSYTATYYIYDLSNGEFVRGNELPRPIQYLCWSPVGSKLAYVYQNNIYLKQRPGDPPFQITFNGRENKIFNGIPDWVYEEEMLATKYALWWSPNGKFLAYAEFNDTDIPVIAYSYYGDEQYPRTINIPYPKAGAKNPFVRIFIIDTTYPAYVGPQEVPVPAMIASSDYYFSWLTWVTDERVCLQWLKRVQNVSVLSICDFREDWQTWDCPKTQEHIEESRTGWAGGFFVSTPVFSYDAISYYKIFSDKDGYKHIHYIKDTVENAIQITSGKWEAINIFRVTQDSLFYSSNEFEDYPGRRNIYRISIGSYPPSKKCVTCHLRKERCQYYTASFSDYAKYYALVCYGPGIPISTLHDGRTDQEIKILEENKELENALKNIQLPKEEIKKLEVDEITLWYKMILPPQFDRSKKYPLLIQVYGGPCSQSVRSVFAVNWISYLASKEGMVIALVDGRGTAFQGDKLLYAVYRKLGVYEVEDQITAVRKFIEMGFIDEKRIAIWGWSYGGYVSSLALASGTGLFKCGIAVAPVSSWEYYASVYTERFMGLPTKDDNLEHYKNSTVMARAEYFRNVDYLLIHGTADDNVHFQNSAQIAKALVNAQVDFQAMWYSDQNHGLSGLSTNHLYTHMTHFLKQCFSLSDGKKKKKKGHHHHHH

SEQ ID NO: 139 - protein, 257 aa, Homo sapiens
MAQRMTTQLLLLLVWVAVVGEAQTRIAWARTELLNVCMNAKHHKEKPGPEDKLHEQCRPWRKNACCSTNTSQEAHKDVSYLYRFNWNHCGEMAPACKRHFIQDTCLYECSPNLGPWIQQVDQSWRKERVLNVPLCKEDCEQWWEDCRTSYTCKSNWHKGWNWTSGFNKCAVGAACQPFHFYFPTPTVLCNEIWTHSYKVSNYSRGSGRCIQMWFDPAQGNPNEEVARFYAAAMSGAGPWAAWPFLLSLALMLLWLLS

SEQ ID NO: 140 - protein, 255 aa, Mus musculus
MAHLMTVQLLLLVMWMAECAQSRATRARTELLNVCMDAKHHKEKPGPEDNLHDQCSPWKTNSCCSTNTSQEAHKDISYLYRFNWNHCGTMTSECKRHFIQDTCLYECSPNLGPWIQQVDQSWRKERILDVPLCKEDCQQWWEDCQSSFTCKSNWHKGWNWSSGHNECPVGASCHPFTFYFPTSAALCEEIWSHSYKLSNYSRGSGRCIQMWFDPAQGNPNEEVARFYAEAMSGAGFHGTWPLLCSLSLVLLWVIS

SEQ ID NO: 141 - protein, 257 aa, Cynomolgus
MAQRMTTQLLLLLVWVAVVGEAQTRTARARTELLNVCMNAKHHKEKPGPEDKLHEQCRPWKKNACCSTNTSQEAHKDVSYLYRFNWNHCGEMAPACKRHFIQDTCLYECSPNLGPWIQQVDQSWRKERVLNVPLCKEDCERWWEDCRTSYTCKSNWHKGWNWTSGFNKCPVGAACQPFHFYFPTPTVLCNEIWTYSYKVSNYSRGSGRCIQMWFDPAQGNPNEEVARFYAAAMSGAGPWAAWPLLLSLALTLLWLLS

SEQ ID NO: 142 - protein, 2322 aa, Homo sapiens
MQSGPRPPLPAPGLALALTLTMLARLASAASFFGENHLEVPVATALTDIDLQLQFSTSQPEALLLLAAGPADHLLLQLYSGRLQVRLVLGQEELRLQTPAETLLSDSIPHTVVLTVVEGWATLSVDGFLNASSAVPGAPLEVPYGLFVGGTGTLGLPYLRGTSRPLRGCLHAATLNGRSLLRPLTPDVHEGCAEEFSASDDVALGFSGPHSLAAFPAWGTQDEGTLEFTLTTQSRQAPLAFQAGGRRGDFIYVDIFEGHLRAVVEKGQGTVLLHNSVPVADGQPHEVSVHINAHRLEISVDQYPTHTSNRGVLSYLEPRGSLLLGGLDAEASRHLQEHRLGLTPEATNASLLGCMEDLSVNGQRRGLREALLTRNMAAGCRLEEEEYEDDAYGHYEAFSTLAPEAWPAMELPEPCVPEPGLPPVFANFTQLLTISPLVVAEGGTAWLEWRHVQPTLDLMEAELRKSQVLFSVTRGARHGELELDIPGAQARKMFTLLDVVNRKARFIHDGSEDTSDQLVLEVSVTARVPMPSCLRRGQTYLLPIQVNPVNDPPHIIFPHGSLMVILEHTQKPLGPEVFQAYDPDSACEGLTFQVLGTSSGLPVERRDQPGEPATEFSCRELEAGSLVYVHRGGPAQDLTFRVSDGLQASPPATLKVVAIRPAIQIHRSTGLRLAQGSAMPILPANLSVETNAVGQDVSVLFRVTGALQFGELQKQGAGGVEGAEWWATQAFHQRDVEQGRVRYLSTDPQHHAYDTVENLALEVQVGQEILSNLSFPVTIQRATVWMLRLEPLHTQNTQQETLTTAHLEATLEEAGPSPPTFHYEVVQAPRKGNLQLQGTRLSDGQGFTQDDIQAGRVTYGATARASEAVEDTFRFRVTAPPYFSPLYTFPIHIGGDPDAPVLTNVLLVVPEGGEGVLSADHLFVKSLNSASYLYEVMERPRHGRLAWRGTQDKTTMVTSFTNEDLLRGRLVYQHDDSETTEDDIPFVATRQGESSGDMAWEEVRGVFRVAIQPVNDHAPVQTISRIFHVARGGRRLLTTDDVAFSDADSGFADAQLVLTRKDLLFGSIVAVDEPTRPIYRFTQEDLRKRRVLFVHSGADRGWIQLQVSDGQHQATALLEVQASEPYLRVANGSSLVVPQGGQGTIDTAVLHLDTNLDIRSGDEVHYHVTAGPRWGQLVRAGQPATAFSQQDLLDGAVLYSHNGSLSPRDTMAFSVEAGPVHTDATLQVTIALEGPLAPLKLVRHKKIYVFQGEAAEIRRDQLEAAQEAVPPADIVFSVKSPPSAGYLVMVSRGALADEPPSLDPVQSFSQEAVDTGRVLYLHSRPEAWSDAFSLDVASGLGAPLEGVLVELEVLPAAIPLEAQNFSVPEGGSLTLAPPLLRVSGPYFPTLLGLSLQVLEPPQHGALQKEDGPQARTLSAFSWRMVEEQLIRYVHDGSETLTDSFVLMANASEMDRQSHPVAFTVTVLPVNDQPPILTTNTGLQMWEGATAPIPAEALRSTDGDSGSEDLVYTIEQPSNGRVVLRGAPGTEVRSFTQAQLDGGLVLFSHRGTLDGGFRFRLSDGEHTSPGHFFRVTAQKQVLLSLKGSQTLTVCPGSVQPLSSQTLRASSSAGTDPQLLLYRVVRGPQLGRLFHAQQDSTGEALVNFTQAEVYAGNILYEHEMPPEPFWEAHDTLELQLSSPPARDVAATLAVAVSFEAACPQRPSHLWKNKGLWVPEGQRARITVAALDASNLLASVPSPQRSEHDVLFQVTQFPSRGQLLVSEEPLHAGQPHFLQSQLAAGQLVYAHGGGGTQQDGFHFRAHLQGPAGASVAGPQTSEAFAITVRDVNERPPQPQASVPLRLTRGSRAPISRAQLSVVDPDSAPGEIEYEVQRAPHNGFLSLVGGGLGPVTRFTQADVDSGRLAFVANGSSVAGIFQLSMSDGASPPLPMSLAVDILPSAIEVQLRAPLEVPQALGRSSLSQQQLRVVSDREEPEAAYRLIQGPQYGHLLVGGRPTSAFSQFQIDQGEVVFAFTNFSSSHDHFRVLALARGVNASAVVNVTVRALLHVWAGGPWPQGATLRLDPTVLDAGELANRTGSVPRFRLLEGPRHGRVVRVPRARTEPGGSQLVEQFTQQDLEDGRLGLEVGRPEGRAPGPAGDSLTLELWAQGVPPAVASLDFATEPYNAARPYSVALLSVPEAARTEAGKPESSTPTGEPGPMASSPEPAVAKGGFLSFLEANMFSVIIPMCLVLLLLALILPLLFYLRKRNKTGKHDVQVLTAKPRNGLAGDTETFRKVEPGQAIPLTAVPGQGPPPGGQPDPELLQFCRTPNPALKNGQYWV

SEQ ID NO: 143 - protein, 1210 aa, Homo sapiens [sequence omitted]

SEQ ID NO: 144 - protein, 1255 aa, Homo sapiens [sequence omitted]

SEQ ID NO: 145 - protein, 645 aa, Homo sapiens
MPIWKFPDEEGACQPCPINCTHSCVDLDDKGCPAEQRASPLTSIISAVVGILLVVVLGVVFGILIKRRQQKIRKYTMRRLLQETELVEPLTPSGAMPNQAQMRILKETELRKVKVLGSGAFGTVYKGIWIPDGENVKIPVAIKVLRENTSPKANKEILDEAYVMAGVGSPYVSRLLGICLTSTVQLVTQLMPYGCLLDHVRENRGRLGSQDLLNWCMQIAKGMSYLEDVRLVHRDLAARNVLVKSPNHVKITDFGLARLLDIDETEYHADGGKVPIKWMALESILRRRFTHQSDVWSYGVTVWELMTFGAKPYDGIPAREIPDLLEKGERLPQPPICTIDVYMIMVKCWMIDSECRPRFRELVSEFSRMARDPQRFVVIQNEDLGPASPLDSTFYRSLLEDDDMGDLVDAEEYLVPQQGFFCPDPAPGAGGMVHHRHRSSSTRSGGGDLTLGLEPSEEEAPRSPLAPSEGAGSDVFDGDLGMGAAKGLQSLPTHDPSPLQRYSEDPTVPLPSETDGYVAPLTCSPQPEYVNQPDVRPQPPSPREGPLPAARPAGATLERPKTLSPGKNGVVKDVFAFGGAVENPEYLTPQGGAAPQPHPPPAFSPAFDNLYYWDQDPPERGAPPSTFKGTPTAENPEYLGLDVPV

SEQ ID NO: 146 - protein, 5 aa, Artificial Sequence
  Peptide linker G4S
GGGGS

SEQ ID NO: 147 - protein, 10 aa, Artificial Sequence
  Peptide linker (G4S)2
GGGGSGGGGS

SEQ ID NO: 148 - protein, 10 aa, Artificial Sequence
  Peptide linker (SG4)2
SGGGGSGGGG

SEQ ID NO: 149 - protein, 14 aa, Artificial Sequence
  Peptide linker G4(SG4)2
GGGGSGGGGSGGGG

SEQ ID NO: 150 - protein, 10 aa, Artificial Sequence
  Peptide linker
GSPGSSSSGS

SEQ ID NO: 151 - protein, 15 aa, Artificial Sequence
  Peptide linker (G4S)3
GGGGSGGGGSGGGGS

SEQ ID NO: 152 - protein, 20 aa, Artificial Sequence
  Peptide linker (G4S)4
GGGGSGGGGSGGGGSGGGGS

SEQ ID NO: 153 - protein, 8 aa, Artificial Sequence
  Peptide linker
GSGSGSGS

SEQ ID NO: 154 - protein, 8 aa, Artificial Sequence
  Peptide linker
GSGSGNGS

SEQ ID NO: 155 - protein, 8 aa, Artificial Sequence
  Peptide linker
GGSGSGSG

SEQ ID NO: 156 - protein, 6 aa, Artificial Sequence
  Peptide linker
GGSGSG

SEQ ID NO: 157 - protein, 4 aa, Artificial Sequence
  Peptide linker
GGSG

SEQ ID NO: 158 - protein, 8 aa, Artificial Sequence
  Peptide linker
GGSGNGSG

SEQ ID NO: 159 - protein, 8 aa, Artificial Sequence
  Peptide linker
GGNGSGSG

SEQ ID NO: 160 - protein, 6 aa, Artificial Sequence
  Peptide linker
GGNGSG

SEQ ID NO: 161 - protein, 215 aa, Artificial Sequence
  Light chain CEA 2F1" (CEA TCB)
DIQMTQSPSSLSASVGDRVTITCKASAAVGTYVAWYQQKPGKAPKLLIYSASYRKRGVPSRFSGSGSGTDFTLTISSLQPEDFATYYCHQYYTYPLFTFGQGTKLEIKRTVAAPSVFIFPPSDEQLKSGTASVVCLLNNFYPREAKVQWKVDNALQSGNSQESVTEQDSKDSTYSLSSTLTLSKADYEKHKVYACEVTHQGLSSPVTKSFNRGEC

SEQ ID NO: 162 - protein, 214 aa, Artificial Sequence
  Light Chain humanized CD3 CH2527 (Crossfab, VL-CH1) (CEA TCB)
QAVVTQEPSLTVSPGGTVTLTCGSSTGAVTTSNYANWVQEKPGQAFRGLIGGTNKRAPGTPARFSGSLLGGKAALTLSGAQPEDEAEYYCALWYSNLWVFGGGTKLTVLSSASTKGPSVFPLAPSSKSTSGGTAALGCLVKDYFPEPVTVSWNSGALTSGVHTFPAVLQSSGLYSLSSVVTVPSSSLGTQTYICNVNHKPSNTKVDKKVEPKSC

SEQ ID NO: 163 - protein, 692 aa, Artificial Sequence
  CEA CH1A1A 98/99 - humanized CD3 CH2527 (Crossfab VH-Ck)-Fc(knob) P329GLALA (CEA TCB)
QVQLVQSGAEVKKPGASVKVSCKASGYTFTEFGMNWVRQAPGQGLEWMGWINTKTGEATYVEEFKGRVTFTTDTSTSTAYMELRSLRSDDTAVYYCARWDFAYYVEAMDYWGQGTTVTVSSASTKGPSVFPLAPSSKSTSGGTAALGCLVKDYFPEPVTVSWNSGALTSGVHTFPAVLQSSGLYSLSSVVTVPSSSLGTQTYICNVNHKPSNTKVDKKVEPKSCDGGGGSGGGGSEVQLLESGGGLVQPGGSLRLSCAASGFTFSTYAMNWVRQAPGKGLEWVSRIRSKYNNYATYYADSVKGRFTISRDDSKNTLYLQMNSLRAEDTAVYYCVRHGNFGNSYVSWFAYWGQGTLVTVSSASVAAPSVFIFPPSDEQLKSGTASVVCLLNNFYPREAKVQWKVDNALQSGNSQESVTEQDSKDSTYSLSSTLTLSKADYEKHKVYACEVTHQGLSSPVTKSFNRGECDKTHTCPPCPAPEAAGGPSVFLFPPKPKDTLMISRTPEVTCVVVDVSHEDPEVKFNWYVDGVEVHNAKTKPREEQYNSTYRVVSVLTVLHQDWLNGKEYKCKVSNKALGAPIEKTISKAKGQPREPQVYTLPPCRDELTKNQVSLWCLVKGFYPSDIAVEWESNGQPENNYKTTPPVLDSDGSFFLYSKLTVDKSRWQQGNVFSCSVMHEALHNHYTQKSLSLSP

SEQ ID NO: 164 - protein, 449 aa, Artificial Sequence
  CEA CH1A1A 98/99 (VH-CH1)-Fc(hole) P329GLALA (CEA TCB)
QVQLVQSGAEVKKPGASVKVSCKASGYTFTEFGMNWVRQAPGQGLEWMGWINTKTGEATYVEEFKGRVTFTTDTSTSTAYMELRSLRSDDTAVYYCARWDFAYYVEAMDYWGQGTTVTVSSASTKGPSVFPLAPSSKSTSGGTAALGCLVKDYFPEPVTVSWNSGALTSGVHTFPAVLQSSGLYSLSSVVTVPSSSLGTQTYICNVNHKPSNTKVDKKVEPKSCDKTHTCPPCPAPEAAGGPSVFLFPPKPKDTLMISRTPEVTCVVVDVSHEDPEVKFNWYVDGVEVHNAKTKPREEQYNSTYRVVSVLTVLHQDWLNGKEYKCKVSNKALGAPIEKTISKAKGQPREPQVCTLPPSRDELTKNQVSLSCAVKGFYPSDIAVEWESNGQPENNYKTTPPVLDSDGSFFLVSKLTVDKSRWQQGNVFSCSVMHEALHNHYTQKSLSLSP

SEQ ID NO: 165 - protein, 232 aa, Artificial Sequence
  CD3 VH-CL (CEACAM5 TCB)
EVQLLESGGGLVQPGGSLRLSCAASGFTFSTYAMNWVRQAPGKGLEWVSRIRSKYNNYATYYADSVKGRFTISRDDSKNTLYLQMNSLRAEDTAVYYCVRHGNFGNSYVSWFAYWGQGTLVTVSSASVAAPSVFIFPPSDEQLKSGTASVVCLLNNFYPREAKVQWKVDNALQSGNSQESVTEQDSKDSTYSLSSTLTLSKADYEKHKVYACEVTHQGLSSPVTKSFNRGEC

SEQ ID NO: 166 - protein, 449 aa, Artificial Sequence
  humanized CEA VH-CH1(EE)-Fc (hole, P329G LALA) (CEACAM5 TCB)
QVQLVQSGAEVKKPGSSVKVSCKASGFNIKDTYMHWVRQAPGQGLEWMGRIDPANGNSKYVPKFQGRVTITADTSTSTAYMELSSLRSEDTAVYYCAPFGYYVSDYAMAYWGQGTLVTVSSASTKGPSVFPLAPSSKSTSGGTAALGCLVEDYFPEPVTVSWNSGALTSGVHTFPAVLQSSGLYSLSSVVTVPSSSLGTQTYICNVNHKPSNTKVDEKVEPKSCDKTHTCPPCPAPEAAGGPSVFLFPPKPKDTLMISRTPEVTCVVVDVSHEDPEVKFNWYVDGVEVHNAKTKPREEQYNSTYRVVSVLTVLHQDWLNGKEYKCKVSNKALGAPIEKTISKAKGQPREPQVCTLPPSRDELTKNQVSLSCAVKGFYPSDIAVEWESNGQPENNYKTTPPVLDSDGSFFLVSKLTVDKSRWQQGNVFSCSVMHEALHNHYTQKSLSLSP

SEQ ID NO: 167 - protein, 674 aa, Artificial Sequence
  humanized CEA VH-CH1(EE)-CD3 VL-CH1-Fc (knob, P329G LALA) (CEACAM5 TCB)
QVQLVQSGAEVKKPGSSVKVSCKASGFNIKDTYMHWVRQAPGQGLEWMGRIDPANGNSKYVPKFQGRVTITADTSTSTAYMELSSLRSEDTAVYYCAPFGYYVSDYAMAYWGQGTLVTVSSASTKGPSVFPLAPSSKSTSGGTAALGCLVEDYFPEPVTVSWNSGALTSGVHTFPAVLQSSGLYSLSSVVTVPSSSLGTQTYICNVNHKPSNTKVDEKVEPKSCDGGGGSGGGGSQAVVTQEPSLTVSPGGTVTLTCGSSTGAVTTSNYANWVQEKPGQAFRGLIGGTNKRAPGTPARFSGSLLGGKAALTLSGAQPEDEAEYYCALWYSNLWVFGGGTKLTVLSSASTKGPSVFPLAPSSKSTSGGTAALGCLVKDYFPEPVTVSWNSGALTSGVHTFPAVLQSSGLYSLSSVVTVPSSSLGTQTYICNVNHKPSNTKVDKKVEPKSCDKTHTCPPCPAPEAAGGPSVFLFPPKPKDTLMISRTPEVTCVVVDVSHEDPEVKFNWYVDGVEVHNAKTKPREEQYNSTYRVVSVLTVLHQDWLNGKEYKCKVSNKALGAPIEKTISKAKGQPREPQVYTLPPCRDELTKNQVSLWCLVKGFYPSDIAVEWESNGQPENNYKTTPPVLDSDGSFFLYSKLTVDKSRWQQGNVFSCSVMHEALHNHYTQKSLSLSP

SEQ ID NO: 168 - protein, 218 aa, Artificial Sequence
  humanized CEA VL-CL(RK) (CEACAM5 TCB)
EIVLTQSPATLSLSPGERATLSCRAGESVDIFGVGFLHWYQQKPGQAPRLLIYRASNRATGIPARFSGSGSGTDFTLTISSLEPEDFAVYYCQQTNEDPYTFGQGTKLEIKRTVAAPSVFIFPPSDRKLKSGTASVVCLLNNFYPREAKVQWKVDNALQSGNSQESVTEQDSKDSTYSLSSTLTLSKADYEKHKVYACEVTHQGLSSPVTKSFNRGEC

SEQ ID NO: 169 - protein, 420 aa, Artificial Sequence
  CEACAM5-based antigen Hu N(A2-B2)A-avi-His
QLTTESMPFNVAEGKEVLLLVHNLPQQLFGYSWYKGERVDGNRQIVGYAIGTQQATPGPANSGRETIYPNASLLIQNVTQNDTGFYTLQVIKSDLVNEEATGQFHVYPELPKPFITSNNSNPVEDEDAVALTCEPEIQNTTYLWWVNNQSLPVSPRLQLSNDNRTLTLLSVTRNDVGPYECGIQNKLSVDHSDPVILNVLYGPDDPTISPSYTYYRPGVNLSLSCHAASNPPAQYSWLIDGNIQQHTQELFISNITEKNSGLYTCQANNSASGHSRTTVKTITVSALSPVVAKPQIKASKTTVTGDKDSVNLTCSTNDTGISIRWFFKNQSLPSSERMKLSQGNITLSINPVKREDAGTYWCEVFNPISKNQSDPIMLNVNYNALPQENLINVDGSGLNDIFEAQKIEWHEARAHHHHHH

SEQ ID NO: 170 - protein, 5 aa, Artificial Sequence
  CEA (A5B7)- CDR-H1
DYYMN

SEQ ID NO: 171 - protein, 19 aa, Artificial Sequence
  CEA (A5B7)- CDR-H2
FIGNKANGYTTEYSASVKG

SEQ ID NO: 172 - protein, 10 aa, Artificial Sequence
  CEA (A5B7)- CDR-H3
DRGLRFYFDY

SEQ ID NO: 173 - protein, 10 aa, Artificial Sequence
  CEA (A5B7)- CDR-L1
RASSSVTYIH

SEQ ID NO: 174 - protein, 7 aa, Artificial Sequence
  CEA (A5B7)- CDR-L2
ATSNLAS

SEQ ID NO: 175 - protein, 9 aa, Artificial Sequence
  CEA (A5B7)- CDR-L3
QHWSSKPPT

SEQ ID NO: 176 - protein, 215 aa, Artificial Sequence
  IgG1 Fc knob PGLALA
APEAAGGPSVFLFPPKPKDTLMISRTPEVTCVVVDVSHEDPEVKFNWYVDGVEVHNAKTKPREEQYNSTYRVVSVLTVLHQDWLNGKEYKCKVSNKALGAPIEKTISKAKGQPREPQVYTLPPCRDELTKNQVSLWCLVKGFYPSDIAVEWESNGQPENNYKTTPPVLDSDGSFFLYSKLTVDKSRWQQGNVFSCSVMHEALHNHYTQKSLSLSP

SEQ ID NO: 177 - protein, 215 aa, Artificial Sequence
  IgG1 Fc hole PGLALA
APEAAGGPSVFLFPPKPKDTLMISRTPEVTCVVVDVSHEDPEVKFNWYVDGVEVHNAKTKPREEQYNSTYRVVSVLTVLHQDWLNGKEYKCKVSNKALGAPIEKTISKAKGQPREPQVCTLPPSRDELTKNQVSLSCAVKGFYPSDIAVEWESNGQPENNYKTTPPVLDSDGSFFLVSKLTVDKSRWQQGNVFSCSVMHEALHNHYTQKSLSLSP

SEQ ID NO: 178 - protein, 121 aa, Artificial Sequence
  CEA (A5B7) VH (parental)
EVKLVESGGGLVQPGGSLRLSCATSGFTFTDYYMNWVRQPPGKALEWLGFIGNKANGYTTEYSASVKGRFTISRDKSQSILYLQMNTLRAEDSATYYCTRDRGLRFYFDYWGQGTTLTVSS

SEQ ID NO: 179 - protein, 106 aa, Artificial Sequence
  CEA (A5B7) VL (parental)
QTVLSQSPAILSASPGEKVTMTCRASSSVTYIHWYQQKPGSSPKSWIYATSNLASGVPARFSGSGSGTSYSLTISRVEAEDAATYYCQHWSSKPPTFGGGTKLEIK

SEQ ID NO: 180 - protein, 10 aa, Artificial Sequence
  CEA (A5H1EL1D)- CDR-H1
GFTFTDYYMN

SEQ ID NO: 181 - protein, 19 aa, Artificial Sequence
  CEA (A5H1EL1D)- CDR-H2
FIGNKANAYTTEYSASVKG

SEQ ID NO: 182 - protein, 10 aa, Artificial Sequence
  CEA (A5H1EL1D)- CDR-H3
DRGLRFYFDY

SEQ ID NO: 183 - protein, 10 aa, Artificial Sequence
  CEA (A5H1EL1D)- CDR-L1
RASSSVTYIH

SEQ ID NO: 184 - protein, 7 aa, Artificial Sequence
  CEA (A5H1EL1D)- CDR-L2
ATSNLAS

SEQ ID NO: 185 - protein, 9 aa, Artificial Sequence
  CEA (A5H1EL1D)- CDR-L3
QHWSSKPPT

SEQ ID NO: 186 - protein, 121 aa, Artificial Sequence
  CEA (A5H1EL1D) VH (3-23A5-1E)
EVQLLESGGGLVQPGGSLRLSCAASGFTFTDYYMNWVRQAPGKGLEWLGFIGNKANAYTTEYSASVKGRFTISRDKSKNTLYLQMNSLRAEDTATYYCTRDRGLRFYFDYWGQGTTVTVSS

SEQ ID NO: 187 - protein, 106 aa, Artificial Sequence
  CEA (A5H1EL1D) VL (A5-L1D)
EIVLTQSPATLSLSPGERATLSCRASSSVTYIHWYQQKPGQAPRSWIYATSNLASGIPARFSGSGSGTDFTLTISSLEPEDFAVYYCQHWSSKPPTFGQGTKLEIK

SEQ ID NO: 188 - protein, 10 aa, Artificial Sequence
  CEA (A5H1EL1D aff. mat.) CDR-H1 consensus
  VARIANT (3)..(3): X is Thr or Tyr
  VARIANT (5)..(5): X is Thr or Ser
  VARIANT (8)..(8): X is Tyr or Ala or Glu
GFXFXDYXMN

SEQ ID NO: 189 - protein, 19 aa, Artificial Sequence
  CEA (A5H1EL1D aff. mat.) CDR-H2 consensus
  VARIANT (1)..(1): X is Phe or Val
  VARIANT (3)..(3): X is Gly or Ser
XIXNKANAYTTEYSASVKG

SEQ ID NO: 190 - protein, 10 aa, Artificial Sequence
  CEA (A5H1EL1D aff. mat.) CDR-H3 consensus
  VARIANT (4)..(4): X is Leu or Ile
  VARIANT (7)..(7): X is Tyr or Gly or Gln or Ser
DRGXRFXFDY

SEQ ID NO: 191 - protein, 10 aa, Artificial Sequence
  CEA (A5H1EL1D aff. mat.) CDR-L1 consensus
  VARIANT (1)..(1): X is Arg or His
XASSSVTYIH

SEQ ID NO: 192 - protein, 7 aa, Artificial Sequence
  CEA (A5H1EL1D aff. mat.) CDR-L2 consensus
ATSNLAS

SEQ ID NO: 193 - protein, 9 aa, Artificial Sequence
  CEA (A5H1EL1D aff. mat.) CDR-L3 consensus
  VARIANT (6)..(6): X is Lys or Val or Gln or Ile
  VARIANT (7)..(7): X is Pro or Ser
QHWSSXXPT

SEQ ID NO: 194 - protein, 121 aa, Artificial Sequence
  CEA (P006.038) VH
EVQLLESGGGLVQPGGSLRLSCAASGFTFTDYYMNWVRQAPGKGLEWLGFIGNKANAYTTEYSASVKGRFTISRDKSKNTLYLQMNSLRAEDTATYYCTRDRGIRFGFDYWGQGTTVTVSS

SEQ ID NO: 195 - protein, 106 aa, Artificial Sequence
  CEA (P006.038) VL
EIVLTQSPATLSLSPGERATLSCRASSSVTYIHWYQQKPGQAPRSWIYATSNLASGIPARFSGSGSGTDFTLTISSLEPEDFAVYYCQHWSSVPPTFGQGTKLEIK

SEQ ID NO: 196 - protein, 121 aa, Artificial Sequence
  CEA (P005.097) VH
EVQLLESGGGLVQPGGSLRLSCAASGFTFTDYYMNWVRQAPGKGLEWLGFIGNKANAYTTEYSASVKGRFTISRDKSKNTLYLQMNSLRAEDTATYYCTRDRGLRFSFDYWGQGTTVTVSS

SEQ ID NO: 197 - protein, 106 aa, Artificial Sequence
  CEA (P005.097) VL
EIVLTQSPATLSLSPGERATLSCRASSSVTYIHWYQQKPGQAPRSWIYATSNLASGIPARFSGSGSGTDFTLTISSLEPEDFAVYYCQHWSSQPPTFGQGTKLEIK

SEQ ID NO: 198 - protein, 121 aa, Artificial Sequence
  CEA (P005.103) VH
EVQLLESGGGLVQPGGSLRLSCAASGFTFTDYYMNWVRQAPGKGLEWLGFIGNKANAYTTEYSASVKGRFTISRDKSKNTLYLQMNSLRAEDTATYYCTRDRGIRFYFDYWGQGTTVTVSS

SEQ ID NO: 199 - protein, 106 aa, Artificial Sequence
  CEA (P005.103) VL
EIVLTQSPATLSLSPGERATLSCRASSSVTYIHWYQQKPGQAPRSWIYATSNLASGIPARFSGSGSGTDFTLTISSLEPEDFAVYYCQHWSSISPTFGQGTKLEIK

SEQ ID NO: 200 - protein, 121 aa, Artificial Sequence
  CEA (P002.139) VH
EVQLLESGGGLVQPGGSLRLSCAASGFYFTDYAMNWVRQAPGKGLEWLGVISNKANAYTTEYSASVKGRFTISRDKSKNTLYLQMNSLRAEDTATYYCTRDRGLRFYFDYWGQGTTVTVSS

SEQ ID NO: 201 - protein, 106 aa, Artificial Sequence
  CEA (P002.139) VL
EIVLTQSPATLSLSPGERATLSCHASSSVTYIHWYQQKPGQAPRSWIYATSNLASGIPARFSGSGSGTDFTLTISSLEPEDFAVYYCQHWSSKPPTFGQGTKLEIK

SEQ ID NO: 202 - protein, 121 aa, Artificial Sequence
  CEA (P001.177) VH
EVQLLESGGGLVQPGGSLRLSCAASGFYFTDYYMNWVRQAPGKGLEWLGFISNKANAYTTEYSASVKGRFTISRDKSKNTLYLQMNSLRAEDTATYYCTRDRGLRFYFDYWGQGTTVTVSS

SEQ ID NO: 203 - protein, 106 aa, Artificial Sequence; identical to SEQ ID NO: 187
  CEA (P001.177) VL

SEQ ID NO: 204 - protein, 121 aa, Artificial Sequence
  CEA (P005.102) VH
EVQLLESGGGLVQPGGSLRLSCAASGFTFTDYYMNWVRQAPGKGLEWLGFIGNKANAYTTEYSASVKGRFTISRDKSKNTLYLQMNSLRAEDTATYYCTRDRGIRFQFDYWGQGTTVTVSS

SEQ ID NO: 205 - protein, 106 aa, Artificial Sequence
  CEA (P005.102) VL
EIVLTQSPATLSLSPGERATLSCRASSSVTYIHWYQQKPGQAPRSWIYATSNLASGIPARFSGSGSGTDFTLTISSLEPEDFAVYYCQHWSSKSPTFGQGTKLEIK

SEQ ID NO: 206 - protein, 121 aa, Artificial Sequence
  CEA (P005.102 combo1) VH
EVQLLESGGGLVQPGGSLRLSCAASGFYFTDYYMNWVRQAPGKGLEWLGVISNKANAYTTEYSASVKGRFTISRDKSKNTLYLQMNSLRAEDTATYYCTRDRGIRFQFDYWGQGTTVTVSS

SEQ ID NO: 207 - protein, 106 aa, Artificial Sequence; identical to SEQ ID NO: 205
  CEA (P005.102 combo1) VL

SEQ ID NO: 208 - protein, 121 aa, Artificial Sequence
  CEA (P005.102 combo2) VH
EVQLLESGGGLVQPGGSLRLSCAASGFYFSDYYMNWVRQAPGKGLEWLGVISNKANAYTTEYSASVKGRFTISRDKSKNTLYLQMNSLRAEDTATYYCTRDRGIRFQFDYWGQGTTVTVSS

SEQ ID NO: 209 - protein, 106 aa, Artificial Sequence; identical to SEQ ID NO: 205
  CEA (P005.102 combo2) VL

SEQ ID NO: 210 - protein, 121 aa, Artificial Sequence
  CEA (P005.103 combo1) VH
EVQLLESGGGLVQPGGSLRLSCAASGFTFTDYYMNWVRQAPGKGLEWLGFIGNKANAYTTEYSASVKGRFTISRDKSKNTLYLQMNSLRAEDTATYYCTRDRGIRFSFDYWGQGTTVTVSS

SEQ ID NO: 211 - protein, 106 aa, Artificial Sequence; identical to SEQ ID NO: 199
  CEA (P005.103 combo1) VL

SEQ ID NO: 212 - protein, 121 aa, Artificial Sequence
  CEA (P005.103 combo2) VH
EVQLLESGGGLVQPGGSLRLSCAASGFYFTDYYMNWVRQAPGKGLEWLGVISNKANAYTTEYSASVKGRFTISRDKSKNTLYLQMNSLRAEDTATYYCTRDRGIRFSFDYWGQGTTVTVSS

SEQ ID NO: 213 - protein, 106 aa, Artificial Sequence; identical to SEQ ID NO: 199
  CEA (P005.103 combo2) VL

SEQ ID NO: 214 - protein, 121 aa, Artificial Sequence
  CEA (P006.038 combo1) VH
EVQLLESGGGLVQPGGSLRLSCAASGFYFTDYAMNWVRQAPGKGLEWLGVISNKANAYTTEYSASVKGRFTISRDKSKNTLYLQMNSLRAEDTATYYCTRDRGIRFGFDYWGQGTTVTVSS

SEQ ID NO: 215 - protein, 106 aa, Artificial Sequence; identical to SEQ ID NO: 195
  CEA (P006.038 combo1) VL

SEQ ID NO: 216 - protein, 121 aa, Artificial Sequence
  CEA (P006.038 combo2) VH
EVQLLESGGGLVQPGGSLRLSCAASGFTFSDYEMNWVRQAPGKGLEWLGFISNKANAYTTEYSASVKGRFTISRDKSKNTLYLQMNSLRAEDTATYYCTRDRGIRFGFDYWGQGTTVTVSS

SEQ ID NO: 217 - protein, 106 aa, Artificial Sequence; identical to SEQ ID NO: 195
  CEA (P006.038 combo2) VL

SEQ ID NO: 218 - protein, 98 aa, Artificial Sequence
  IGHV3-23-02
EVQLLESGGGLVQPGGSLRLSCAASGFTFSSYAMSWVRQAPGKGLEWVSAISGSGGSTYYGDSVKGRFTISRDNSKNTLYLQMNSLRAEDTAVYYCAK

SEQ ID NO: 219 - protein, 100 aa, Artificial Sequence
  IGHV3-15*01
EVQLVESGGGLVKPGGSLRLSCAASGFTFSNAWMSWVRQAPGKGLEWVGRIKSKTDGGTTDYAAPVKGRFTISRDDSKNTLYLQMNSLKTEDTAVYYCTT

SEQ ID NO: 220 - protein, 121 aa, Artificial Sequence
  3-23A5-1
EVQLLESGGGLVQPGGSLRLSCAASGFTFTDYYMNWVRQAPGKGLEWVGFIGNKANGYTTEYSASVKGRFTISRDNSKNTLYLQMNSLRAEDTAVYYCARDRGLRFYFDYWGQGTTVTVSS

SEQ ID NO: 221 - protein, 121 aa, Artificial Sequence
  3-23A5-2
EVQLLESGGGLVQPGGSLRLSCAASGFTFTDYYMNWVRQAPGKGLEWVGFIGNKANGYTTYYGDSVKGRFTISRDNSKNTLYLQMNSLRAEDTAVYYCARDRGLRFYFDYWGQGTTVTVSS

SEQ ID NO: 222 - protein, 119 aa, Artificial Sequence
  3-23A5-3
EVQLLESGGGLVQPGGSLRLSCAASGFTFTDYYMNWVRQAPGKGLEWVGFIGNKGYTTEYSASVKGRFTISRDNSKNTLYLQMNSLRAEDTAVYYCARDRGLRFYFDYWGQGTTVTVSS

SEQ ID NO: 223 - protein, 121 aa, Artificial Sequence
  3-23A5-4
EVQLLESGGGLVQPGGSLRLSCAASGFTFTDYYMSWVRQAPGKGLEWVGFIGNKANGYTTEYSASVKGRFTISRDNSKNTLYLQMNSLRAEDTAVYYCARDRGLRFYFDYWGQGTTVTVSS

SEQ ID NO: 224 - protein, 121 aa, Artificial Sequence
  3-23A5-1A (all_backmutations)
EVQLLESGGGLVQPGGSLRLSCAASGFTFTDYYMNWVRQAPGKGLEWLGFIGNKANGYTTEYSASVKGRFTISRDKSKNTLYLQMNSLRAEDTATYYCTRDRGLRFYFDYWGQGTTVTVSS

SEQ ID NO: 225 - protein, 121 aa, Artificial Sequence
  3-23A5-1C (A93T)
EVQLLESGGGLVQPGGSLRLSCAASGFTFTDYYMNWVRQAPGKGLEWVGFIGNKANGYTTEYSASVKGRFTISRDNSKNTLYLQMNSLRAEDTAVYYCTRDRGLRFYFDYWGQGTTVTVSS

SEQ ID NO: 226 - protein, 121 aa, Artificial Sequence
  3-23A5-1D (K73)
EVQLLESGGGLVQPGGSLRLSCAASGFTFTDYYMNWVRQAPGKGLEWVGFIGNKANGYTTEYSASVKGRFTISRDKSKNTLYLQMNSLRAEDTAVYYCARDRGLRFYFDYWGQGTTVTVSS

SEQ ID NO: 227 - protein, 121 aa, Artificial Sequence
  3-15A5-1
EVQLVESGGGLVKPGGSLRLSCAASGFTFTDYYMNWVRQAPGKGLEWVGFIGNKANGYTTEYSASVKGRFTISRDDSKNTLYLQMNSLKTEDTAVYYCTRDRGLRFYFDYWGQGTTVTVSS

SEQ ID NO: 228 - protein, 121 aa, Artificial Sequence
  3-15A5-2
EVQLVESGGGLVKPGGSLRLSCAASGFTFTDYYMNWVRQAPGKGLEWVGFIGNKANGYTTEYAAPVKGRFTISRDDSKNTLYLQMNSLKTEDTAVYYCTRDRGLRFYFDYWGQGTTVTVSS

SEQ ID NO: 229 - protein, 121 aa, Artificial Sequence
  3-15A5-3
EVQLVESGGGLVKPGGSLRLSCAASGFTFTDYYMNWVRQAPGKGLEWVGFIGNKANGGTTDYAAPVKGRFTISRDDSKNTLYLQMNSLKTEDTAVYYCTRDRGLRFYFDYWGQGTTVTVSS

SEQ ID NO: 230 - protein, 95 aa, Artificial Sequence
  IGKV3-11
EIVLTQSPATLSLSPGERATLSCRASQSVSSYLAWYQQKPGQAPRLLIYDASNRATGIPARFSGSGSGTDFTLTISSLEPEDFAVYYCQQRSNWP

SEQ ID NO: 231 - protein, 106 aa, Artificial Sequence
  A5-L1
EIVLTQSPATLSLSPGERATLSCRASSSVTYIHWYQQKPGQAPRLLIYATSNLASGIPARFSGSGSGTDFTLTISSLEPEDFAVYYCQHWSSKPPTFGQGTKLEIK

SEQ ID NO: 232 - protein, 107 aa, Artificial Sequence
  A5-L2
EIVLTQSPATLSLSPGERATLSCRASQSVSSYIHWYQQKPGQAPRLLIYATSNLASGIPARFSGSGSGTDFTLTISSLEPEDFAVYYCQHWSSKPPTFGQGTKLEIK

SEQ ID NO: 233 - protein, 106 aa, Artificial Sequence
  A5-L3
EIVLTQSPATLSLSPGERATLSCRASSSVTYIHWYQQKPGQAPRLLIYDASNRATGIPARFSGSGSGTDFTLTISSLEPEDFAVYYCQHWSSKPPTFGQGTKLEIK

SEQ ID NO: 234 - protein, 106 aa, Artificial Sequence
  A5-L4
EIVLTQSPATLSLSPGERATLSCRASSSVTYIHWYQQKPGQAPRLLIYATSNLASGIPARFSGSGSGTDFTLTISSLEPEDFAVYYCQQWSSKPPTFGQGTKLEIK

SEQ ID NO: 235 - protein, 106 aa, Artificial Sequence
  A5-L1A (all_backmutations)
QTVLTQSPATLSLSPGERATLSCRASSSVTYIHWYQQKPGSSPKSWIYATSNLASGIPARFSGSGSGTDYTLTISSLEPEDFAVYYCQHWSSKPPTFGQGTKLEIK

SEQ ID NO: 236 - protein, 106 aa, Artificial Sequence
  A5-L1B (Q1T2)
QTVLTQSPATLSLSPGERATLSCRASSSVTYIHWYQQKPGQAPRLLIYATSNLASGIPARFSGSGSGTDFTLTISSLEPEDFAVYYCQHWSSKPPTFGQGTKLEIK

SEQ ID NO: 237 - protein, 106 aa, Artificial Sequence
  A5-L1C (FR2)
EIVLTQSPATLSLSPGERATLSCRASSSVTYIHWYQQKPGSSPKSWIYATSNLASGIPARFSGSGSGTDFTLTISSLEPEDFAVYYCQHWSSKPPTFGQGTKLEIK

SEQ ID NO: 238 - protein, 428 aa, Artificial Sequence
  NABA-avi-His
QLTTESMPFNVAEGKEVLLLVHNLPQQLFGYSWYKGERVDGNRQIVGYAIGTQQATPGPANSGRETIYPNASLLIQNVTQNDTGFYTLQVIKSDLVNEEATGQFHVYPELPKPSISSNNSNPVEDKDAMAFTCEPETQDTTYLWWINNQSLPVSPRLQLSNGNRTLTLLSVTRNDTGPYECEIQNPVSANRSDPVTLNVTYGPDTPTISPSDTYYRPGANLSLSCYAASNPPAQYSWLINGTFQQSTQELFIPNITVNNSGSYTCHANNSVTGCNRTTVKTIIVTELSPVVAKPQIKASKTTVTGDKDSVNLTCSTNDTGISIRWFFKNQSLPSSERMKLSQGNITLSINPVKREDAGTYWCEVFNPISKNQSDPIMLNVNYNALPQENLINVDLEVLFQGPGSGLNDIFEAQKIEWHEARAHHHHHH

SEQ ID NO: 239 - protein, 420 aa, Artificial Sequence; identical to SEQ ID NO: 169
  N(A2B2)A-avi-His

SEQ ID NO: 240 - protein, 420 aa, Artificial Sequence
  NA(B2)A-avi-His
QLTTESMPFNVAEGKEVLLLVHNLPQQLFGYSWYKGERVDGNRQIVGYAIGTQQATPGPANSGRETIYPNASLLIQNVTQNDTGFYTLQVIKSDLVNEEATGQFHVYPELPKPSISSNNSNPVEDKDAMAFTCEPETQDTTYLWWINNQSLPVSPRLQLSNGNRTLTLLSVTRNDTGPYECEIQNPVSANRSDPVTLNVTYGPDDPTISPSYTYYRPGVNLSLSCHAASNPPAQYSWLIDGNIQQHTQELFISNITEKNSGLYTCQANNSASGHSRTTVKTITVSALSPVVAKPQIKASKTTVTGDKDSVNLTCSTNDTGISIRWFFKNQSLPSSERMKLSQGNITLSINPVKREDAGTYWCEVFNPISKNQSDPIMLNVNYNALPQENLINVDGSGLNDIFEAQKIEWHEARAHHHHHH

SEQ ID NO: 241 - DNA, 90 bp, Artificial Sequence
  A5H1EL1D_H1_rev_TN
  misc_feature (40)..(42): n is a, c, g, or t and codes for 50% N; 20% S; 3% D/E/Q/G/Y/V/T/H/A/L
  misc_feature (46)..(48): n is a, c, g, or t and codes for  50% Y; 20% A; 3.75% G/V/T/H/L/I/R/F
  misc_feature (49)..(51): n is a, c, g, or t and codes for  60% Y; 4% G/V/H/S/E/Q/N/D/R/F
  misc_feature (52)..(54): n is a, c, g, or t and codes for  50% D; 20% S; 4.3% G/Y/T/N/A/E/Q
  misc_feature (55)..(57): n is a, c, g, or t and codes for  50% T; 20% S; 4.3% A/G/Y/N/D/E/Q
  misc_feature (61)..(62): n is a, c, g, or t and codes for  60% T; 5% A/S/G/Y/N/D/E/Q
  misc_feature (63)..(63): n is a, c, g, or t
cagccactcgaggcctttacccggtgcttggcgtacccannncatnnnnnnnnnnnngaannngaagccagaagccgcgcagctgagacg

SEQ ID NO: 242 - DNA, 84 bp, Artificial Sequence
  A5H1EL1D_H2_for_TN
  misc_feature (37)..(39): n is a, c, g, or t and codes for  60% F; 10% A; 6 % Y/V/L/I/G
  misc_feature (43)..(45): n is a, c, g, or t and codes for  50% G; 20% S; 3% A/K/T/V/N/D/E/Q/L/I
  misc_feature (46)..(48): n is a, c, g, or t and codes for  650% N; 20% G; 3.75 % D/E/Q/S/Y/T/H/A
  misc_feature (49)..(51): n is a, c, g, or t and codes for  60% K; 5% A/T/Y/N/D/E/Q/R
  misc_feature (52)..(54): n is a, c, g, or t and codes for  60% A; 4% V/G/D/P/H/N/E/Q/L/I
  misc_feature (55)..(57): n is a, c, g, or t and codes for  60% N; 5% D/E/Q; 4.17% G/T/H/S/A/R
cgccaagcaccgggtaaaggcctcgagtggctgggtnnnatcnnnnnnnnnnnnnnngcgtacaccacggaatactccgcctcc

SEQ ID NO: 243 - DNA, 26 bp, Artificial Sequence
  LMB3 long
caggaaacagctatgaccatgattac

SEQ ID NO: 244 - DNA, 53 bp, Artificial Sequence
  HCDR3-rev-constant
aacggtcaccgtggtaccctggccccagtagtcgaaatagaagcgcagaccac

SEQ ID NO: 245 - DNA, 84 bp, Artificial Sequence
  A5H1EL1D _L1_rev_TN
  misc_feature (37)..(39): n is a, c, g, or t and codes for 50% H; 20% A; 3.33% R/K/G/S/T/Q/Y/N/V
  misc_feature (40)..(42): n is a, c, g, or t and codes for 70% I; 30% L
  misc_feature (43)..(45): n is a, c, g, or t and codes for  60% Y; 4% F/G/A/V/T/H/S/N/Q/R
  misc_feature (46)..(48): n is a, c, g, or t and codes for  50% T; 20% S; 2.72% A/G/Y/V/P/H/N/D/E/Q/R
  misc_feature (49)..(51): n is a, c, g, or t and codes for 50% V; 20% S; 3.33% T/A/G/N/Q/F/Y/P/H
  misc_feature (52)..(54): n is a, c, g, or t and codes for 50% S; 20% V; 3.33% T/A/G/N/D/E/Q/Y/H
ggaacgcggggcctggcctggtttttgctgataccannnnnnnnnnnnnnnnnngctggatgcgcggcaagacagggtagcacg

SEQ ID NO: 246 - DNA, 84 bp, Artificial Sequence
  A5H1EL1D _L2_for_TN
  misc_feature (37)..(39): n is a, c, g, or t and codes for  60% Y; 10% F; 7.5% H/K/N/S
  misc_feature (40)..(42): n is a, c, g, or t and codes for  50% A; 20% D; 3.33% V/G/S/T/Y/H/N/E/Q
  misc_feature (43)..(45): n is a, c, g, or t and codes for  50% T; 20% A; 3.33% S/G/V/P/H/N/D/E/Q
  misc_feature (46)..(48): n is a, c, g, or t and codes for  60% S; 4% T/A/G/N/D/E/Q/Y/V/H
  misc_feature (49)..(51): n is a, c, g, or t and codes for  60% N; 4% D/E/Q/Y/K/T/H/S/A/R
cagcaaaaaccaggccaggccccgcgttcctggatcnnnnnnnnnnnnnnnctcgcttctggtatcccggcacgtttctccggc

SEQ ID NO: 247 - DNA, 84 bp, Artificial Sequence
  A5H1EL1D _L3_for_TN
  misc_feature (31)..(33): n is a, c, g, or t and codes for  90% Q; 10% H
  misc_feature (34)..(36): n is a, c, g, or t and codes for  60% H; 5% R/K/Q/E/Y/F/N/D
  misc_feature (37)..(39): n is a, c, g, or t and codes for 65% W; 7% F/Y/V/L/I
  misc_feature (40)..(42): n is a, c, g, or t and codes for  58% S; 4% T/A/G/N/D/E/Q; 2% Y/V/P/H/L/I/R
  misc_feature (43)..(45): n is a, c, g, or t and codes for  58% S; 4% T/A/G/N/D/E/Q; 2% Y/V/P/H/L/I/R
  misc_feature (46)..(48): n is a, c, g, or t and codes for  60% K; 5% R/H; 2.72% A/V/T/P/Y/N/D/E/Q/L/I
  misc_feature (49)..(51): n is a, c, g, or t and codes for  70% P; 5% A/S/T/R/S/L
  misc_feature (52)..(54): n is a, c, g, or t and codes for 60% P; 5% L/G/R/M; 2.86% A/V/L/I/F/S/R
gagcctgaagattttgccgtatactattgtnnnnnnnnnnnnnnnnnnnnnnnnactttcggtcagggcaccaagctggaaatc

SEQ ID NO: 248 - DNA, 90 bp, Artificial Sequence
  A5H1EL1D _H3_rev_TN
  misc_feature (34)..(36): n is a, c, g, or t and codes for  80% F; 10% I/L
  misc_feature (37)..(39): n is a, c, g or t and codes for  60% Y; 5% F/W; 2.14% G/A/V/T/P/H/S/N/D/E/Q/L/I/R
  misc_feature (40)..(42): n is a, c, g, or t and codes for  65% F; 5% Y/W/A/V/L/I/G
  misc_feature (43)..(45): n is a, c, g or t and codes for 60% R; 5% K/H; 2.72% A/V/T/P/Y/N/D/E/Q/L/I
  misc_feature (46)..(48): n is a, c, g, or t and codes for 60% L; 4% I/V/A/F; 2.4% G/Y/T/P/H/S/N/D/E/Q
  misc_feature (49)..(51): n is a, c, g, or t and codes for 60% G; 5% A/S/T; 2.5% Y/V/P/H/N/D/E/Q/L/I
  misc_feature (52)..(54): n is a, c, g, or t and codes for  60% R; 5% K/H; 2.72% A/V/T/P/Y/N/D/E/Q/L/I
  misc_feature (55)..(57): n is a, c, g, or t
  misc_feature (58)..(60): n is a, c, g, or t and codes for  80% F; 10% I/L
  misc_feature (58)..(60): n is a, c, g, or t and codes for  60% R; 10% K; 2.72% A/V/T/P/Y/N/D/E/Q/L/H
aacggtcaccgtggtaccctggccccagtagtcnnnnnnnnnnnnnnnnnnnnnnnnnnnagtacagtagtaggtggcggtgtcttctgc

SEQ ID NO: 249 - DNA, 30 bp, Artificial Sequence
  LCDR3-rev-constant
acaatagtatacggcaaaatcttcaggctc

SEQ ID NO: 250 - DNA, 36 bp, Artificial Sequence
  HCDR3 amplification
agaaacggtcaccgtggtaccctggccccagtagtc

SEQ ID NO: 251 - protein, 10 aa, Artificial Sequence
  CEA (P006.038)- CDR-H1
GFTFTDYYMN

SEQ ID NO: 252 - protein, 19 aa, Artificial Sequence
  CEA (P006.038)- CDR-H2
FIGNKANAYTTEYSASVKG

SEQ ID NO: 253 - protein, 10 aa, Artificial Sequence
  CEA (P006.038)- CDR-H3
DRGIRFGFDY

SEQ ID NO: 254 - protein, 10 aa, Artificial Sequence
  CEA (P006.038)- CDR-L1
RASSSVTYIH

SEQ ID NO: 255 - protein, 7 aa, Artificial Sequence
  CEA (P006.038)- CDR-L2
ATSNLAS

SEQ ID NO: 256 - protein, 9 aa, Artificial Sequence
  CEA (P006.038)- CDR-L3
QHWSSVPPT

SEQ ID NO: 257 - protein, 10 aa, Artificial Sequence
  CEA (P005.097)- CDR-H1
GFTFTDYYMN

SEQ ID NO: 258 - protein, 19 aa, Artificial Sequence
  CEA (P005.097)- CDR-H2
FIGNKANAYTTEYSASVKG

SEQ ID NO: 259 - protein, 10 aa, Artificial Sequence
  CEA (P005.097)- CDR-H3
DRGLRFSFDY

SEQ ID NO: 260 - protein, 10 aa, Artificial Sequence
  CEA (P005.097)- CDR-L1
RASSSVTYIH

SEQ ID NO: 261 - protein, 7 aa, Artificial Sequence
  CEA (P005.097)- CDR-L2
ATSNLAS

SEQ ID NO: 262 - protein, 9 aa, Artificial Sequence
  CEA (P005.097)- CDR-L3
QHWSSQPPT

SEQ ID NO: 263 - protein, 10 aa, Artificial Sequence
  CEA (P005.103)- CDR-H1
GFTFTDYYMN

SEQ ID NO: 264 - protein, 19 aa, Artificial Sequence
  CEA (P005.103)- CDR-H2
FIGNKANAYTTEYSASVKG

SEQ ID NO: 265 - protein, 10 aa, Artificial Sequence
  CEA (P005.103)- CDR-H3
DRGIRFYFDY

SEQ ID NO: 266 - protein, 10 aa, Artificial Sequence
  CEA (P005.103)- CDR-L1
RASSSVTYIH

SEQ ID NO: 267 - protein, 7 aa, Artificial Sequence
  CEA (P005.103)- CDR-L2
ATSNLAS

SEQ ID NO: 268 - protein, 9 aa, Artificial Sequence
  CEA (P005.103)- CDR-L3
QHWSSISPT

SEQ ID NO: 269 - protein, 10 aa, Artificial Sequence
  CEA (P002.139)- CDR-H1
GFYFTDYAMN

SEQ ID NO: 270 - protein, 19 aa, Artificial Sequence
  CEA (P002.139)- CDR-H2
VISNKANAYTTEYSASVKG

SEQ ID NO: 271 - protein, 10 aa, Artificial Sequence
  CEA (P002.139)- CDR-H3
DRGLRFYFDY

SEQ ID NO: 272 - protein, 10 aa, Artificial Sequence
  CEA (P002.139)- CDR-L1
HASSSVTYIH

SEQ ID NO: 273 - protein, 7 aa, Artificial Sequence
  CEA (P002.139)- CDR-L2
ATSNLAS

SEQ ID NO: 274 - protein, 9 aa, Artificial Sequence
  CEA (P002.139)- CDR-L3
QHWSSKPPT

SEQ ID NO: 275 - protein, 10 aa, Artificial Sequence
  CEA (P001.177)- CDR-H1
GFYFTDYYMN

SEQ ID NO: 276 - protein, 19 aa, Artificial Sequence
  CEA (P001.177)- CDR-H2
FISNKANAYTTEYSASVKG

SEQ ID NO: 277 - protein, 10 aa, Artificial Sequence
  CEA (P001.177)- CDR-H3
DRGLRFYFDY

SEQ ID NO: 278 - protein, 10 aa, Artificial Sequence
  CEA (P001.177)- CDR-L1
RASSSVTYIH

SEQ ID NO: 279 - protein, 7 aa, Artificial Sequence
  CEA (P001.177)- CDR-L2
ATSNLAS

SEQ ID NO: 280 - protein, 9 aa, Artificial Sequence
  CEA (P001.177)- CDR-L3
QHWSSKPPT

SEQ ID NO: 281 - protein, 10 aa, Artificial Sequence
  CEA (P005.102)- CDR-H1
GFTFTDYYMN

SEQ ID NO: 282 - protein, 19 aa, Artificial Sequence
  CEA (P005.102)- CDR-H2
FIGNKANAYTTEYSASVKG

SEQ ID NO: 283 - protein, 10 aa, Artificial Sequence
  CEA (P005.102)- CDR-H3
DRGIRFQFDY

SEQ ID NO: 284 - protein, 10 aa, Artificial Sequence
  CEA (P005.102)- CDR-L1
RASSSVTYIH

SEQ ID NO: 285 - protein, 7 aa, Artificial Sequence
  CEA (P005.102)- CDR-L2
ATSNLAS

SEQ ID NO: 286 - protein, 9 aa, Artificial Sequence
  CEA (P005.102)- CDR-L3
QHWSSKSPT

SEQ ID NO: 287 - protein, 10 aa, Artificial Sequence
  CEA (P005.102-combo1)- CDR-H1
GFYFTDYYMN

SEQ ID NO: 288 - protein, 19 aa, Artificial Sequence
  CEA (P005.102-combo1)- CDR-H2
VISNKANAYTTEYSASVKG

SEQ ID NO: 289 - protein, 10 aa, Artificial Sequence
  CEA (P005.102-combo1)- CDR-H3
DRGIRFQFDY

SEQ ID NO: 290 - protein, 10 aa, Artificial Sequence
  CEA (P005.102-combo1)- CDR-L1
RASSSVTYIH

SEQ ID NO: 291 - protein, 7 aa, Artificial Sequence
  CEA (P005.102-combo1)- CDR-L2
ATSNLAS

SEQ ID NO: 292 - protein, 9 aa, Artificial Sequence
  CEA (P005.102-combo1)- CDR-L3
QHWSSKSPT

SEQ ID NO: 293 - protein, 10 aa, Artificial Sequence
  CEA (P005.102-combo2)- CDR-H1
GFYFSDYYMN

SEQ ID NO: 294 - protein, 19 aa, Artificial Sequence
  CEA (P005.102-combo2)- CDR-H2
VISNKANAYTTEYSASVKG

SEQ ID NO: 295 - protein, 10 aa, Artificial Sequence
  CEA (P005.102-combo2)- CDR-H3
DRGIRFQFDY

SEQ ID NO: 296 - protein, 10 aa, Artificial Sequence
  CEA (P005.102-combo2)- CDR-L1
RASSSVTYIH

SEQ ID NO: 297 - protein, 7 aa, Artificial Sequence
  CEA (P005.102-combo2)- CDR-L2
ATSNLAS

SEQ ID NO: 298 - protein, 9 aa, Artificial Sequence
  CEA (P005.102-combo2)- CDR-L3
QHWSSKSPT

SEQ ID NO: 299 - protein, 10 aa, Artificial Sequence
  CEA (P005.103-combo1)- CDR-H1
GFTFTDYYMN

SEQ ID NO: 300 - protein, 19 aa, Artificial Sequence
  CEA (P005.103-combo1)- CDR-H2
FIGNKANAYTTEYSASVKG

SEQ ID NO: 301 - protein, 10 aa, Artificial Sequence
  CEA (P005.103-combo1)- CDR-H3
DRGIRFSFDY

SEQ ID NO: 302 - protein, 10 aa, Artificial Sequence
  CEA (P005.103-combo1)- CDR-L1
RASSSVTYIH

SEQ ID NO: 303 - protein, 7 aa, Artificial Sequence
  CEA (P005.103-combo1)- CDR-L2
ATSNLAS

SEQ ID NO: 304 - protein, 9 aa, Artificial Sequence
  CEA (P005.103-combo1)- CDR-L3
QHWSSISPT

SEQ ID NO: 305 - protein, 10 aa, Artificial Sequence
  CEA (P005.103-combo2)- CDR-H1
GFYFTDYYMN

SEQ ID NO: 306 - protein, 19 aa, Artificial Sequence
  CEA (P005.103-combo2)- CDR-H2
VISNKANAYTTEYSASVKG

SEQ ID NO: 307 - protein, 10 aa, Artificial Sequence
  CEA (P005.103-combo2)- CDR-H3
DRGIRFSFDY

SEQ ID NO: 308 - protein, 10 aa, Artificial Sequence
  CEA (P005.103-combo2)- CDR-L1
RASSSVTYIH

SEQ ID NO: 309 - protein, 7 aa, Artificial Sequence
  CEA (P005.103-combo2)- CDR-L2
ATSNLAS

SEQ ID NO: 310 - protein, 9 aa, Artificial Sequence
  CEA (P005.103-combo2)- CDR-L3
QHWSSISPT

SEQ ID NO: 311 - protein, 10 aa, Artificial Sequence
  CEA (P006.038-combo1)- CDR-H1
GFYFTDYAMN

SEQ ID NO: 312 - protein, 19 aa, Artificial Sequence
  CEA (P006.038-combo1)- CDR-H2
VISNKANAYTTEYSASVKG

SEQ ID NO: 313 - protein, 10 aa, Artificial Sequence
  CEA (P006.038-combo1)- CDR-H3
DRGIRFGFDY

SEQ ID NO: 314 - protein, 10 aa, Artificial Sequence
  CEA (P006.038-combo1)- CDR-L1
RASSSVTYIH

SEQ ID NO: 315 - protein, 7 aa, Artificial Sequence
  CEA (P006.038-combo1)- CDR-L2
ATSNLAS

SEQ ID NO: 316 - protein, 9 aa, Artificial Sequence
  CEA (P006.038-combo1)- CDR-L3
QHWSSVPPT

SEQ ID NO: 317 - protein, 10 aa, Artificial Sequence
  CEA (P006.038-combo2)- CDR-H1
GFTFSDYEMN

SEQ ID NO: 318 - protein, 19 aa, Artificial Sequence
  CEA (P006.038-combo2)- CDR-H2
FISNKANAYTTEYSASVKG

SEQ ID NO: 319 - protein, 10 aa, Artificial Sequence
  CEA (P006.038-combo2)- CDR-H3
DRGIRFGFDY

SEQ ID NO: 320 - protein, 10 aa, Artificial Sequence
  CEA (P006.038-combo2)- CDR-L1
RASSSVTYIH

SEQ ID NO: 321 - protein, 7 aa, Artificial Sequence
  CEA (P006.038-combo2)- CDR-L2
ATSNLAS

SEQ ID NO: 322 - protein, 9 aa, Artificial Sequence
  CEA (P006.038-combo2)- CDR-L3
QHWSSVPPT

SEQ ID NO: 323 - protein, 449 aa, Artificial Sequence
  VL CEA (A5H1EL1D) -CH1- Fc hole PGLALA
EVQLLESGGGLVQPGGSLRLSCAASGFTFTDYYMNWVRQAPGKGLEWLGFIGNKANAYTTEYSASVKGRFTISRDKSKNTLYLQMNSLRAEDTATYYCTRDRGLRFYFDYWGQGTTVTVSSASTKGPSVFPLAPSSKSTSGGTAALGCLVKDYFPEPVTVSWNSGALTSGVHTFPAVLQSSGLYSLSSVVTVPSSSLGTQTYICNVNHKPSNTKVDKKVEPKSCDKTHTCPPCPAPEAAGGPSVFLFPPKPKDTLMISRTPEVTCVVVDVSHEDPEVKFNWYVDGVEVHNAKTKPREEQYNSTYRVVSVLTVLHQDWLNGKEYKCKVSNKALGAPIEKTISKAKGQPREPQVCTLPPSRDELTKNQVSLSCAVKGFYPSDIAVEWESNGQPENNYKTTPPVLDSDGSFFLVSKLTVDKSRWQQGNVFSCSVMHEALHNHYTQKSLSLSP

SEQ ID NO: 324 - protein, 213 aa, Artificial Sequence
  VH CEA (A5H1EL1D) - CL
EIVLTQSPATLSLSPGERATLSCRASSSVTYIHWYQQKPGQAPRSWIYATSNLASGIPARFSGSGSGTDFTLTISSLEPEDFAVYYCQHWSSKPPTFGQGTKLEIKRTVAAPSVFIFPPSDEQLKSGTASVVCLLNNFYPREAKVQWKVDNALQSGNSQESVTEQDSKDSTYSLSSTLTLSKADYEKHKVYACEVTHQGLSSPVTKSFNRGEC

SEQ ID NO: 325 - protein, 436 aa, Artificial Sequence
  VL CEA (P006.038) -CH1- Fc hole PGLALA
EIVLTQSPATLSLSPGERATLSCRASSSVTYIHWYQQKPGQAPRSWIYATSNLASGIPARFSGSGSGTDFTLTISSLEPEDFAVYYCQHWSSVPPTFGQGTKLEIKSSASTKGPSVFPLAPSSKSTSGGTAALGCLVKDYFPEPVTVSWNSGALTSGVHTFPAVLQSSGLYSLSSVVTVPSSSLGTQTYICNVNHKPSNTKVDKKVEPKSCDKTHTCPPCPAPEAAGGPSVFLFPPKPKDTLMISRTPEVTCVVVDVSHEDPEVKFNWYVDGVEVHNAKTKPREEQYNSTYRVVSVLTVLHQDWLNGKEYKCKVSNKALGAPIEKTISKAKGQPREPQVCTLPPSRDELTKNQVSLSCAVKGFYPSDIAVEWESNGQPENNYKTTPPVLDSDGSFFLVSKLTVDKSRWQQGNVFSCSVMHEALHNHYTQKSLSLSP

SEQ ID NO: 326 - protein, 228 aa, Artificial Sequence
  VH CEA (P006.038) - CL
EVQLLESGGGLVQPGGSLRLSCAASGFTFTDYYMNWVRQAPGKGLEWLGFIGNKANAYTTEYSASVKGRFTISRDKSKNTLYLQMNSLRAEDTATYYCTRDRGIRFGFDYWGQGTTVTVSSASVAAPSVFIFPPSDEQLKSGTASVVCLLNNFYPREAKVQWKVDNALQSGNSQESVTEQDSKDSTYSLSSTLTLSKADYEKHKVYACEVTHQGLSSPVTKSFNRGEC

SEQ ID NO: 327 - protein, 436 aa, Artificial Sequence
  VL CEA (P005.097) -CH1- Fc hole PGLALA
EIVLTQSPATLSLSPGERATLSCRASSSVTYIHWYQQKPGQAPRSWIYATSNLASGIPARFSGSGSGTDFTLTISSLEPEDFAVYYCQHWSSQPPTFGQGTKLEIKSSASTKGPSVFPLAPSSKSTSGGTAALGCLVKDYFPEPVTVSWNSGALTSGVHTFPAVLQSSGLYSLSSVVTVPSSSLGTQTYICNVNHKPSNTKVDKKVEPKSCDKTHTCPPCPAPEAAGGPSVFLFPPKPKDTLMISRTPEVTCVVVDVSHEDPEVKFNWYVDGVEVHNAKTKPREEQYNSTYRVVSVLTVLHQDWLNGKEYKCKVSNKALGAPIEKTISKAKGQPREPQVCTLPPSRDELTKNQVSLSCAVKGFYPSDIAVEWESNGQPENNYKTTPPVLDSDGSFFLVSKLTVDKSRWQQGNVFSCSVMHEALHNHYTQKSLSLSP

SEQ ID NO: 328 - protein, 228 aa, Artificial Sequence
  VH CEA (P005.097) - CL
EVQLLESGGGLVQPGGSLRLSCAASGFTFTDYYMNWVRQAPGKGLEWLGFIGNKANAYTTEYSASVKGRFTISRDKSKNTLYLQMNSLRAEDTATYYCTRDRGLRFSFDYWGQGTTVTVSSASVAAPSVFIFPPSDEQLKSGTASVVCLLNNFYPREAKVQWKVDNALQSGNSQESVTEQDSKDSTYSLSSTLTLSKADYEKHKVYACEVTHQGLSSPVTKSFNRGEC

SEQ ID NO: 329 - protein, 436 aa, Artificial Sequence
  VL CEA (P005.103) -CH1- Fc hole PGLALA
EIVLTQSPATLSLSPGERATLSCRASSSVTYIHWYQQKPGQAPRSWIYATSNLASGIPARFSGSGSGTDFTLTISSLEPEDFAVYYCQHWSSISPTFGQGTKLEIKSSASTKGPSVFPLAPSSKSTSGGTAALGCLVKDYFPEPVTVSWNSGALTSGVHTFPAVLQSSGLYSLSSVVTVPSSSLGTQTYICNVNHKPSNTKVDKKVEPKSCDKTHTCPPCPAPEAAGGPSVFLFPPKPKDTLMISRTPEVTCVVVDVSHEDPEVKFNWYVDGVEVHNAKTKPREEQYNSTYRVVSVLTVLHQDWLNGKEYKCKVSNKALGAPIEKTISKAKGQPREPQVCTLPPSRDELTKNQVSLSCAVKGFYPSDIAVEWESNGQPENNYKTTPPVLDSDGSFFLVSKLTVDKSRWQQGNVFSCSVMHEALHNHYTQKSLSLSP

SEQ ID NO: 330 - protein, 228 aa, Artificial Sequence
  VH CEA (P005.103) - CL
EVQLLESGGGLVQPGGSLRLSCAASGFTFTDYYMNWVRQAPGKGLEWLGFIGNKANAYTTEYSASVKGRFTISRDKSKNTLYLQMNSLRAEDTATYYCTRDRGIRFYFDYWGQGTTVTVSSASVAAPSVFIFPPSDEQLKSGTASVVCLLNNFYPREAKVQWKVDNALQSGNSQESVTEQDSKDSTYSLSSTLTLSKADYEKHKVYACEVTHQGLSSPVTKSFNRGEC

SEQ ID NO: 331 - protein, 436 aa, Artificial Sequence
  VL CEA (P002.139) -CH1- Fc hole PGLALA
EIVLTQSPATLSLSPGERATLSCHASSSVTYIHWYQQKPGQAPRSWIYATSNLASGIPARFSGSGSGTDFTLTISSLEPEDFAVYYCQHWSSKPPTFGQGTKLEIKSSASTKGPSVFPLAPSSKSTSGGTAALGCLVKDYFPEPVTVSWNSGALTSGVHTFPAVLQSSGLYSLSSVVTVPSSSLGTQTYICNVNHKPSNTKVDKKVEPKSCDKTHTCPPCPAPEAAGGPSVFLFPPKPKDTLMISRTPEVTCVVVDVSHEDPEVKFNWYVDGVEVHNAKTKPREEQYNSTYRVVSVLTVLHQDWLNGKEYKCKVSNKALGAPIEKTISKAKGQPREPQVCTLPPSRDELTKNQVSLSCAVKGFYPSDIAVEWESNGQPENNYKTTPPVLDSDGSFFLVSKLTVDKSRWQQGNVFSCSVMHEALHNHYTQKSLSLSP

SEQ ID NO: 332 - protein, 228 aa, Artificial Sequence
  VH CEA (P002.139) - CL
EVQLLESGGGLVQPGGSLRLSCAASGFYFTDYAMNWVRQAPGKGLEWLGVISNKANAYTTEYSASVKGRFTISRDKSKNTLYLQMNSLRAEDTATYYCTRDRGLRFYFDYWGQGTTVTVSSASVAAPSVFIFPPSDEQLKSGTASVVCLLNNFYPREAKVQWKVDNALQSGNSQESVTEQDSKDSTYSLSSTLTLSKADYEKHKVYACEVTHQGLSSPVTKSFNRGEC

SEQ ID NO: 333 - protein, 436 aa, Artificial Sequence
  VL CEA (P001.177) -CH1- Fc hole PGLALA
EIVLTQSPATLSLSPGERATLSCRASSSVTYIHWYQQKPGQAPRSWIYATSNLASGIPARFSGSGSGTDFTLTISSLEPEDFAVYYCQHWSSKPPTFGQGTKLEIKSSASTKGPSVFPLAPSSKSTSGGTAALGCLVKDYFPEPVTVSWNSGALTSGVHTFPAVLQSSGLYSLSSVVTVPSSSLGTQTYICNVNHKPSNTKVDKKVEPKSCDKTHTCPPCPAPEAAGGPSVFLFPPKPKDTLMISRTPEVTCVVVDVSHEDPEVKFNWYVDGVEVHNAKTKPREEQYNSTYRVVSVLTVLHQDWLNGKEYKCKVSNKALGAPIEKTISKAKGQPREPQVCTLPPSRDELTKNQVSLSCAVKGFYPSDIAVEWESNGQPENNYKTTPPVLDSDGSFFLVSKLTVDKSRWQQGNVFSCSVMHEALHNHYTQKSLSLSP

SEQ ID NO: 334 - protein, 228 aa, Artificial Sequence
  VH CEA (P001.177) - CL
EVQLLESGGGLVQPGGSLRLSCAASGFYFTDYYMNWVRQAPGKGLEWLGFISNKANAYTTEYSASVKGRFTISRDKSKNTLYLQMNSLRAEDTATYYCTRDRGLRFYFDYWGQGTTVTVSSASVAAPSVFIFPPSDEQLKSGTASVVCLLNNFYPREAKVQWKVDNALQSGNSQESVTEQDSKDSTYSLSSTLTLSKADYEKHKVYACEVTHQGLSSPVTKSFNRGEC

SEQ ID NO: 335 - protein, 436 aa, Artificial Sequence
  VL CEA (P005.102) -CH1- Fc hole PGLALA
EIVLTQSPATLSLSPGERATLSCRASSSVTYIHWYQQKPGQAPRSWIYATSNLASGIPARFSGSGSGTDFTLTISSLEPEDFAVYYCQHWSSKSPTFGQGTKLEIKSSASTKGPSVFPLAPSSKSTSGGTAALGCLVKDYFPEPVTVSWNSGALTSGVHTFPAVLQSSGLYSLSSVVTVPSSSLGTQTYICNVNHKPSNTKVDKKVEPKSCDKTHTCPPCPAPEAAGGPSVFLFPPKPKDTLMISRTPEVTCVVVDVSHEDPEVKFNWYVDGVEVHNAKTKPREEQYNSTYRVVSVLTVLHQDWLNGKEYKCKVSNKALGAPIEKTISKAKGQPREPQVCTLPPSRDELTKNQVSLSCAVKGFYPSDIAVEWESNGQPENNYKTTPPVLDSDGSFFLVSKLTVDKSRWQQGNVFSCSVMHEALHNHYTQKSLSLSP

SEQ ID NO: 336 - protein, 228 aa, Artificial Sequence
  VH CEA (P005.102) - CL
EVQLLESGGGLVQPGGSLRLSCAASGFTFTDYYMNWVRQAPGKGLEWLGFIGNKANAYTTEYSASVKGRFTISRDKSKNTLYLQMNSLRAEDTATYYCTRDRGIRFQFDYWGQGTTVTVSSASVAAPSVFIFPPSDEQLKSGTASVVCLLNNFYPREAKVQWKVDNALQSGNSQESVTEQDSKDSTYSLSSTLTLSKADYEKHKVYACEVTHQGLSSPVTKSFNRGEC

SEQ ID NO: 337 - protein, 436 aa, Artificial Sequence; identical to SEQ ID NO: 335
  VL CEA (P005.102 combo1) -CH1- Fc hole PGLALA

SEQ ID NO: 338 - protein, 228 aa, Artificial Sequence
  VH CEA (P005.102 combo1) - CL
EVQLLESGGGLVQPGGSLRLSCAASGFYFTDYYMNWVRQAPGKGLEWLGVISNKANAYTTEYSASVKGRFTISRDKSKNTLYLQMNSLRAEDTATYYCTRDRGIRFQFDYWGQGTTVTVSSASVAAPSVFIFPPSDEQLKSGTASVVCLLNNFYPREAKVQWKVDNALQSGNSQESVTEQDSKDSTYSLSSTLTLSKADYEKHKVYACEVTHQGLSSPVTKSFNRGEC

SEQ ID NO: 339 - protein, 436 aa, Artificial Sequence; identical to SEQ ID NO: 335
  VL CEA (P005.102 combo2) -CH1- Fc hole PGLALA

SEQ ID NO: 340 - protein, 228 aa, Artificial Sequence
  VH CEA (P005.102 combo2) - CL
EVQLLESGGGLVQPGGSLRLSCAASGFYFSDYYMNWVRQAPGKGLEWLGVISNKANAYTTEYSASVKGRFTISRDKSKNTLYLQMNSLRAEDTATYYCTRDRGIRFQFDYWGQGTTVTVSSASVAAPSVFIFPPSDEQLKSGTASVVCLLNNFYPREAKVQWKVDNALQSGNSQESVTEQDSKDSTYSLSSTLTLSKADYEKHKVYACEVTHQGLSSPVTKSFNRGEC

SEQ ID NO: 341 - protein, 436 aa, Artificial Sequence; identical to SEQ ID NO: 329
  VL CEA (P005.103 combo1) -CH1- Fc hole PGLALA

SEQ ID NO: 342 - protein, 228 aa, Artificial Sequence
  VH CEA (P005.103 combo1) - CL
EVQLLESGGGLVQPGGSLRLSCAASGFTFTDYYMNWVRQAPGKGLEWLGFIGNKANAYTTEYSASVKGRFTISRDKSKNTLYLQMNSLRAEDTATYYCTRDRGIRFSFDYWGQGTTVTVSSASVAAPSVFIFPPSDEQLKSGTASVVCLLNNFYPREAKVQWKVDNALQSGNSQESVTEQDSKDSTYSLSSTLTLSKADYEKHKVYACEVTHQGLSSPVTKSFNRGEC

SEQ ID NO: 343 - protein, 436 aa, Artificial Sequence; identical to SEQ ID NO: 329
  VL CEA (P005.103 combo2) -CH1- Fc hole PGLALA

SEQ ID NO: 344 - protein, 228 aa, Artificial Sequence
  VH CEA (P005.103 combo2) - CL
EVQLLESGGGLVQPGGSLRLSCAASGFYFTDYYMNWVRQAPGKGLEWLGVISNKANAYTTEYSASVKGRFTISRDKSKNTLYLQMNSLRAEDTATYYCTRDRGIRFSFDYWGQGTTVTVSSASVAAPSVFIFPPSDEQLKSGTASVVCLLNNFYPREAKVQWKVDNALQSGNSQESVTEQDSKDSTYSLSSTLTLSKADYEKHKVYACEVTHQGLSSPVTKSFNRGEC

SEQ ID NO: 345 - protein, 436 aa, Artificial Sequence; identical to SEQ ID NO: 325
  VL CEA (P006.038 combo1) -CH1- Fc hole PGLALA

SEQ ID NO: 346 - protein, 228 aa, Artificial Sequence
  VH CEA (P006.038 combo1) - CL
EVQLLESGGGLVQPGGSLRLSCAASGFYFTDYAMNWVRQAPGKGLEWLGVISNKANAYTTEYSASVKGRFTISRDKSKNTLYLQMNSLRAEDTATYYCTRDRGIRFGFDYWGQGTTVTVSSASVAAPSVFIFPPSDEQLKSGTASVVCLLNNFYPREAKVQWKVDNALQSGNSQESVTEQDSKDSTYSLSSTLTLSKADYEKHKVYACEVTHQGLSSPVTKSFNRGEC

SEQ ID NO: 347 - protein, 436 aa, Artificial Sequence; identical to SEQ ID NO: 325
  VL CEA (P006.038 combo2) -CH1- Fc hole PGLALA

SEQ ID NO: 348 - protein, 228 aa, Artificial Sequence
  VH CEA (P006.038 combo2) - CL
EVQLLESGGGLVQPGGSLRLSCAASGFTFSDYEMNWVRQAPGKGLEWLGFISNKANAYTTEYSASVKGRFTISRDKSKNTLYLQMNSLRAEDTATYYCTRDRGIRFGFDYWGQGTTVTVSSASVAAPSVFIFPPSDEQLKSGTASVVCLLNNFYPREAKVQWKVDNALQSGNSQESVTEQDSKDSTYSLSSTLTLSKADYEKHKVYACEVTHQGLSSPVTKSFNRGEC

SEQ ID NO: 349 - protein, 448 aa, Artificial Sequence; identical to SEQ ID NO: 116
  VH CD28 (SA_Variant 15) - CH1- Fc knob PGLALA

SEQ ID NO: 350 - protein, 214 aa, Artificial Sequence; identical to SEQ ID NO: 121
  VL CD28 (SA_Variant 15) - CL

SEQ ID NO: 351 - protein, 436 aa, Artificial Sequence; identical to SEQ ID NO: 333
  CEA(A5H1EL1D) VL-CH1 hu IgG1 Fc hole PGLALA

SEQ ID NO: 352 - protein, 228 aa, Artificial Sequence
  CEA(A5H1EL1D) VH-Ckappa
EVQLLESGGGLVQPGGSLRLSCAASGFTFTDYYMNWVRQAPGKGLEWLGFIGNKANAYTTEYSASVKGRFTISRDKSKNTLYLQMNSLRAEDTATYYCTRDRGLRFYFDYWGQGTTVTVSSASVAAPSVFIFPPSDEQLKSGTASVVCLLNNFYPREAKVQWKVDNALQSGNSQESVTEQDSKDSTYSLSSTLTLSKADYEKHKVYACEVTHQGLSSPVTKSFNRGEC

SEQ ID NO: 353 - protein, 448 aa, Artificial Sequence; identical to SEQ ID NO: 66
  CD28(SA) hu IgG1 VH-CH1 "EE" Fc knob PGLALA

SEQ ID NO: 354 - protein, 214 aa, Artificial Sequence; identical to SEQ ID NO: 65
  CD28(SA) hu IgG1 VL-Ck "RK"

SEQ ID NO: 355 - protein, 448 aa, Artificial Sequence; identical to SEQ ID NO: 114
  CD28(SA_Variant 8) hu IgG1 VH-CH1 "EE" Fc knob PGLALA

SEQ ID NO: 356 - protein, 214 aa, Artificial Sequence; identical to SEQ ID NO: 122
  CD28(SA_Variant 8) hu IgG1 VL-Ck "RK"

SEQ ID NO: 357 - protein, 448 aa, Artificial Sequence; identical to SEQ ID NO: 116
  CD28(SA_Variant 15) hu IgG1 VH-CH1 "EE" Fc knob PGLALA

SEQ ID NO: 358 - protein, 214 aa, Artificial Sequence; identical to SEQ ID NO: 121
  CD28(SA_Variant 15) hu IgG1 VL-Ck "RK"

SEQ ID NO: 359 - protein, 448 aa, Artificial Sequence; identical to SEQ ID NO: 118
  CD28(SA_Variant 29) hu IgG1 VH-CH1 "EE" Fc knob PGLALA

SEQ ID NO: 360 - protein, 449 aa, Artificial Sequence
  CEA(A5H1EL1D) hu IgG1 VH-CH1 "EE" Fc hole PGLALA
EVQLLESGGGLVQPGGSLRLSCAASGFTFTDYYMNWVRQAPGKGLEWLGFIGNKANAYTTEYSASVKGRFTISRDKSKNTLYLQMNSLRAEDTATYYCTRDRGLRFYFDYWGQGTTVTVSSASTKGPSVFPLAPSSKSTSGGTAALGCLVEDYFPEPVTVSWNSGALTSGVHTFPAVLQSSGLYSLSSVVTVPSSSLGTQTYICNVNHKPSNTKVDEKVEPKSCDKTHTCPPCPAPEAAGGPSVFLFPPKPKDTLMISRTPEVTCVVVDVSHEDPEVKFNWYVDGVEVHNAKTKPREEQYNSTYRVVSVLTVLHQDWLNGKEYKCKVSNKALGAPIEKTISKAKGQPREPQVCTLPPSRDELTKNQVSLSCAVKGFYPSDIAVEWESNGQPENNYKTTPPVLDSDGSFFLVSKLTVDKSRWQQGNVFSCSVMHEALHNHYTQKSLSLSP

SEQ ID NO: 361 - protein, 213 aa, Artificial Sequence
  CEA(A5H1EL1D) hu IgG1 VL-Ck "RK"
EIVLTQSPATLSLSPGERATLSCRASSSVTYIHWYQQKPGQAPRSWIYATSNLASGIPARFSGSGSGTDFTLTISSLEPEDFAVYYCQHWSSKPPTFGQGTKLEIKRTVAAPSVFIFPPSDRKLKSGTASVVCLLNNFYPREAKVQWKVDNALQSGNSQESVTEQDSKDSTYSLSSTLTLSKADYEKHKVYACEVTHQGLSSPVTKSFNRGEC

SEQ ID NO: 362 - protein, 437 aa, Artificial Sequence
  CD28(SA) VL-CH1 hu IgG1 Fc knob PGLALA
DIQMTQSPSSLSASVGDRVTITCHASQNIYVWLNWYQQKPGKAPKLLIYKASNLHTGVPSRFSGSGSGTDFTLTISSLQPEDFATYYCQQGQTYPYTFGGGTKVEIKSSASTKGPSVFPLAPSSKSTSGGTAALGCLVKDYFPEPVTVSWNSGALTSGVHTFPAVLQSSGLYSLSSVVTVPSSSLGTQTYICNVNHKPSNTKVDKKVEPKSCDKTHTCPPCPAPEAAGGPSVFLFPPKPKDTLMISRTPEVTCVVVDVSHEDPEVKFNWYVDGVEVHNAKTKPREEQYNSTYRVVSVLTVLHQDWLNGKEYKCKVSNKALGAPIEKTISKAKGQPREPQVYTLPPCRDELTKNQVSLWCLVKGFYPSDIAVEWESNGQPENNYKTTPPVLDSDGSFFLYSKLTVDKSRWQQGNVFSCSVMHEALHNHYTQKSLSLSP

SEQ ID NO: 363 - protein, 227 aa, Artificial Sequence; identical to SEQ ID NO: 77
  CD28(SA) VH-Ckappa

SEQ ID NO: 364 - protein, 437 aa, Artificial Sequence
  CD28(SA_Variant 8) VL-CH1 hu IgG1 Fc knob PGLALA
DIQMTQSPSSLSASVGDRVTITCHASQNIYVYLNWYQQKPGKAPKLLIYKASNLHTGVPSRFSGSGSGTDFTLTISSLQPEDFATYYCQQGQTYPYTFGGGTKVEIKSSASTKGPSVFPLAPSSKSTSGGTAALGCLVKDYFPEPVTVSWNSGALTSGVHTFPAVLQSSGLYSLSSVVTVPSSSLGTQTYICNVNHKPSNTKVDKKVEPKSCDKTHTCPPCPAPEAAGGPSVFLFPPKPKDTLMISRTPEVTCVVVDVSHEDPEVKFNWYVDGVEVHNAKTKPREEQYNSTYRVVSVLTVLHQDWLNGKEYKCKVSNKALGAPIEKTISKAKGQPREPQVYTLPPCRDELTKNQVSLWCLVKGFYPSDIAVEWESNGQPENNYKTTPPVLDSDGSFFLYSKLTVDKSRWQQGNVFSCSVMHEALHNHYTQKSLSLSP

SEQ ID NO: 365 - protein, 227 aa, Artificial Sequence
  CD28(SA_Variant 8) VH-Ckappa
QVQLVQSGAEVKKPGASVKVSCKASGYTFTSYYIHWVRQAPGQGLEWIGSIYPGNVQTNYNEKFKDRATLTVDTSISTAYMELSRLRSDDTAVYFCTRSHYGLDFNFDVWGQGTTVTVSSASVAAPSVFIFPPSDEQLKSGTASVVCLLNNFYPREAKVQWKVDNALQSGNSQESVTEQDSKDSTYSLSSTLTLSKADYEKHKVYACEVTHQGLSSPVTKSFNRGEC

SEQ ID NO: 366 - protein, 437 aa, Artificial Sequence
  CD28(SA_Variant 15) VL-CH1 hu IgG1 Fc knob PGLALA
DIQMTQSPSSLSASVGDRVTITCHASQNIYVFLNWYQQKPGKAPKLLIYKASNLHTGVPSRFSGSGSGTDFTLTISSLQPEDFATYYCQQGQTYPYTFGGGTKVEIKSSASTKGPSVFPLAPSSKSTSGGTAALGCLVKDYFPEPVTVSWNSGALTSGVHTFPAVLQSSGLYSLSSVVTVPSSSLGTQTYICNVNHKPSNTKVDKKVEPKSCDKTHTCPPCPAPEAAGGPSVFLFPPKPKDTLMISRTPEVTCVVVDVSHEDPEVKFNWYVDGVEVHNAKTKPREEQYNSTYRVVSVLTVLHQDWLNGKEYKCKVSNKALGAPIEKTISKAKGQPREPQVYTLPPCRDELTKNQVSLWCLVKGFYPSDIAVEWESNGQPENNYKTTPPVLDSDGSFFLYSKLTVDKSRWQQGNVFSCSVMHEALHNHYTQKSLSLSP

SEQ ID NO: 367 - protein, 227 aa, Artificial Sequence
  CD28(SA_Variant 15) VH-Ckappa
QVQLVQSGAEVKKPGASVKVSCKASGYTFTSYYIHWVRQAPGQGLEWIGSIYPGNVQTNYNEKFKDRATLTVDTSISTAYMELSRLRSDDTAVYFCTRSHYGLDWNFDVWGQGTTVTVSSASVAAPSVFIFPPSDEQLKSGTASVVCLLNNFYPREAKVQWKVDNALQSGNSQESVTEQDSKDSTYSLSSTLTLSKADYEKHKVYACEVTHQGLSSPVTKSFNRGEC

SEQ ID NO: 368 - protein, 227 aa, Artificial Sequence
  CD28(SA_Variant 29) VH-Ckappa
QVQLVQSGAEVKKPGASVKVSCKASGYTFTSYYIHWVRQAPGQGLEWIGSIYPGNVNTNYNEKFKDRATLTVDTSISTAYMELSRLRSDDTAVYFCTRSHYGLDWNFDVWGQGTTVTVSSASVAAPSVFIFPPSDEQLKSGTASVVCLLNNFYPREAKVQWKVDNALQSGNSQESVTEQDSKDSTYSLSSTLTLSKADYEKHKVYACEVTHQGLSSPVTKSFNRGEC

SEQ ID NO: 369 - protein, 441 aa, Artificial Sequence
  CEA(T84.66) VL-CH1 hu IgG1 Fc hole PGLALA
EIVLTQSPATLSLSPGERATLSCRAGESVDIFGVGFLHWYQQKPGQAPRLLIYRASNRATGIPARFSGSGSGTDFTLTISSLEPEDFAVYYCQQTNEDPYTFGQGTKLEIKSSASTKGPSVFPLAPSSKSTSGGTAALGCLVKDYFPEPVTVSWNSGALTSGVHTFPAVLQSSGLYSLSSVVTVPSSSLGTQTYICNVNHKPSNTKVDKKVEPKSCDKTHTCPPCPAPEAAGGPSVFLFPPKPKDTLMISRTPEVTCVVVDVSHEDPEVKFNWYVDGVEVHNAKTKPREEQYNSTYRVVSVLTVLHQDWLNGKEYKCKVSNKALGAPIEKTISKAKGQPREPQVCTLPPSRDELTKNQVSLSCAVKGFYPSDIAVEWESNGQPENNYKTTPPVLDSDGSFFLVSKLTVDKSRWQQGNVFSCSVMHEALHNHYTQKSLSLSP

SEQ ID NO: 370 - protein, 228 aa, Artificial Sequence
  CEA(T84.66) VH-Ckappa
QVQLVQSGAEVKKPGSSVKVSCKASGFNIKDTYMHWVRQAPGQGLEWMGRIDPANGNSKYVPKFQGRVTITADTSTSTAYMELSSLRSEDTAVYYCAPFGYYVSDYAMAYWGQGTLVTVSSASVAAPSVFIFPPSDEQLKSGTASVVCLLNNFYPREAKVQWKVDNALQSGNSQESVTEQDSKDSTYSLSSTLTLSKADYEKHKVYACEVTHQGLSSPVTKSFNRGEC

SEQ ID NO: 371 - protein, 449 aa, Artificial Sequence; identical to SEQ ID NO: 166
  CEA(T84.66) hu IgG1 VH-CH1 "EE" Fc hole PGLALA

SEQ ID NO: 372 - protein, 218 aa, Artificial Sequence; identical to SEQ ID NO: 168
  CEA(T84.66) hu IgG1 VL-Ck "RK"

SEQ ID NO: 373 - protein, 684 aa, Artificial Sequence
  CEA(A5H1EL1D) VH-CH1-VH-CH1 "EE" hu IgG1 Fc hole PGLALA
EVQLLESGGGLVQPGGSLRLSCAASGFTFTDYYMNWVRQAPGKGLEWLGFIGNKANAYTTEYSASVKGRFTISRDKSKNTLYLQMNSLRAEDTATYYCTRDRGLRFYFDYWGQGTTVTVSSASTKGPSVFPLAPSSKSTSGGTAALGCLVEDYFPEPVTVSWNSGALTSGVHTFPAVLQSSGLYSLSSVVTVPSSSLGTQTYICNVNHKPSNTKVDEKVEPKSCDGGGGSGGGGSEVQLLESGGGLVQPGGSLRLSCAASGFTFTDYYMNWVRQAPGKGLEWLGFIGNKANAYTTEYSASVKGRFTISRDKSKNTLYLQMNSLRAEDTATYYCTRDRGLRFYFDYWGQGTTVTVSSASTKGPSVFPLAPSSKSTSGGTAALGCLVEDYFPEPVTVSWNSGALTSGVHTFPAVLQSSGLYSLSSVVTVPSSSLGTQTYICNVNHKPSNTKVDEKVEPKSCDKTHTCPPCPAPEAAGGPSVFLFPPKPKDTLMISRTPEVTCVVVDVSHEDPEVKFNWYVDGVEVHNAKTKPREEQYNSTYRVVSVLTVLHQDWLNGKEYKCKVSNKALGAPIEKTISKAKGQPREPQVCTLPPSRDELTKNQVSLSCAVKGFYPSDIAVEWESNGQPENNYKTTPPVLDSDGSFFLVSKLTVDKSRWQQGNVFSCSVMHEALHNHYTQKSLSLSP

SEQ ID NO: 374 - protein, 672 aa, Artificial Sequence
  CD28(SA) VL-CH1 CEA(A5H1EL1D) VH-CH1 "EE" hu IgG1 Fc knob PGLALA
DIQMTQSPSSLSASVGDRVTITCHASQNIYVWLNWYQQKPGKAPKLLIYKASNLHTGVPSRFSGSGSGTDFTLTISSLQPEDFATYYCQQGQTYPYTFGGGTKVEIKSSASTKGPSVFPLAPSSKSTSGGTAALGCLVKDYFPEPVTVSWNSGALTSGVHTFPAVLQSSGLYSLSSVVTVPSSSLGTQTYICNVNHKPSNTKVDKKVEPKSCDGGGGSGGGGSEVQLLESGGGLVQPGGSLRLSCAASGFTFTDYYMNWVRQAPGKGLEWLGFIGNKANAYTTEYSASVKGRFTISRDKSKNTLYLQMNSLRAEDTATYYCTRDRGLRFYFDYWGQGTTVTVSSASTKGPSVFPLAPSSKSTSGGTAALGCLVEDYFPEPVTVSWNSGALTSGVHTFPAVLQSSGLYSLSSVVTVPSSSLGTQTYICNVNHKPSNTKVDEKVEPKSCDKTHTCPPCPAPEAAGGPSVFLFPPKPKDTLMISRTPEVTCVVVDVSHEDPEVKFNWYVDGVEVHNAKTKPREEQYNSTYRVVSVLTVLHQDWLNGKEYKCKVSNKALGAPIEKTISKAKGQPREPQVYTLPPCRDELTKNQVSLWCLVKGFYPSDIAVEWESNGQPENNYKTTPPVLDSDGSFFLYSKLTVDKSRWQQGNVFSCSVMHEALHNHYTQKSLSLSP

SEQ ID NO: 375 - protein, 436 aa, Artificial Sequence; identical to SEQ ID NO: 333
  CEA(P002.139) VL-CH1 hu IgG1 Fc hole PGLALA

SEQ ID NO: 376 - protein, 228 aa, Artificial Sequence; identical to SEQ ID NO: 352
  CEA(P002.139) VH-Ckappa

SEQ ID NO: 377 - protein, 214 aa, Artificial Sequence
  CD28 (SA_Variant 8) hu IgG1 light chain
DIQMTQSPSSLSASVGDRVTITCHASQNIYVYLNWYQQKPGKAPKLLIYKASNLHTGVPSRFSGSGSGTDFTLTISSLQPEDFATYYCQQGQTYPYTFGGGTKVEIKRTVAAPSVFIFPPSDEQLKSGTASVVCLLNNFYPREAKVQWKVDNALQSGNSQESVTEQDSKDSTYSLSSTLTLSKADYEKHKVYACEVTHQGLSSPVTKSFNRGEC

SEQ ID NO: 378 - protein, 448 aa, Artificial Sequence
  CD28(SA_Variant 8) hu IgG1 PGLALA heavy chain
QVQLVQSGAEVKKPGASVKVSCKASGYTFTSYYIHWVRQAPGQGLEWIGSIYPGNVQTNYNEKFKDRATLTVDTSISTAYMELSRLRSDDTAVYFCTRSHYGLDFNFDVWGQGTTVTVSSASTKGPSVFPLAPSSKSTSGGTAALGCLVKDYFPEPVTVSWNSGALTSGVHTFPAVLQSSGLYSLSSVVTVPSSSLGTQTYICNVNHKPSNTKVDKKVEPKSCDKTHTCPPCPAPEAAGGPSVFLFPPKPKDTLMISRTPEVTCVVVDVSHEDPEVKFNWYVDGVEVHNAKTKPREEQYNSTYRVVSVLTVLHQDWLNGKEYKCKVSNKALGAPIEKTISKAKGQPREPQVYTLPPSRDELTKNQVSLTCLVKGFYPSDIAVEWESNGQPENNYKTTPPVLDSDGSFFLYSKLTVDKSRWQQGNVFSCSVMHEALHNHYTQKSLSLSP

SEQ ID NO: 379 - protein, 214 aa, Artificial Sequence; identical to SEQ ID NO: 62
  CD28 (SA_Variant 11) hu IgG1 light chain

SEQ ID NO: 380 - protein, 448 aa, Artificial Sequence; identical to SEQ ID NO: 378
  CD28 (SA_Variant 11) hu IgG1 PGLALA heavy chain

SEQ ID NO: 381 - protein, 214 aa, Artificial Sequence
  CD28 (SA_Variant 15) hu IgG1 light chain
DIQMTQSPSSLSASVGDRVTITCHASQNIYVFLNWYQQKPGKAPKLLIYKASNLHTGVPSRFSGSGSGTDFTLTISSLQPEDFATYYCQQGQTYPYTFGGGTKVEIKRTVAAPSVFIFPPSDEQLKSGTASVVCLLNNFYPREAKVQWKVDNALQSGNSQESVTEQDSKDSTYSLSSTLTLSKADYEKHKVYACEVTHQGLSSPVTKSFNRGEC

SEQ ID NO: 382 - protein, 448 aa, Artificial Sequence
  CD28 (SA_Variant 15) hu IgG1 PGLALA heavy chain
QVQLVQSGAEVKKPGASVKVSCKASGYTFTSYYIHWVRQAPGQGLEWIGSIYPGNVQTNYNEKFKDRATLTVDTSISTAYMELSRLRSDDTAVYFCTRSHYGLDWNFDVWGQGTTVTVSSASTKGPSVFPLAPSSKSTSGGTAALGCLVKDYFPEPVTVSWNSGALTSGVHTFPAVLQSSGLYSLSSVVTVPSSSLGTQTYICNVNHKPSNTKVDKKVEPKSCDKTHTCPPCPAPEAAGGPSVFLFPPKPKDTLMISRTPEVTCVVVDVSHEDPEVKFNWYVDGVEVHNAKTKPREEQYNSTYRVVSVLTVLHQDWLNGKEYKCKVSNKALGAPIEKTISKAKGQPREPQVYTLPPSRDELTKNQVSLTCLVKGFYPSDIAVEWESNGQPENNYKTTPPVLDSDGSFFLYSKLTVDKSRWQQGNVFSCSVMHEALHNHYTQKSLSLSP

SEQ ID NO: 383 - protein, 214 aa, Artificial Sequence
  CD28 (SA_Variant 27) hu IgG1 light chain
DIQMTQSPSSLSASVGDRVTITCHASQGIYVYLNWYQQKPGKAPKLLIYKASNLHTGVPSRFSGSGSGTDFTLTISSLQPEDFATYYCQQGQTYPYTFGGGTKVEIKRTVAAPSVFIFPPSDEQLKSGTASVVCLLNNFYPREAKVQWKVDNALQSGNSQESVTEQDSKDSTYSLSSTLTLSKADYEKHKVYACEVTHQGLSSPVTKSFNRGEC

SEQ ID NO: 384 - protein, 448 aa, Artificial Sequence
  CD28(SA_Variant 27) hu IgG1 PGLALA heavy chain
QVQLVQSGAEVKKPGASVKVSCKASGYTFTSYYIHWVRQAPGQGLEWIGSIYPGNVNTNYNEKFKDRATLTVDTSISTAYMELSRLRSDDTAVYFCTRSHYGLDWNFDVWGQGTTVTVSSASTKGPSVFPLAPSSKSTSGGTAALGCLVKDYFPEPVTVSWNSGALTSGVHTFPAVLQSSGLYSLSSVVTVPSSSLGTQTYICNVNHKPSNTKVDKKVEPKSCDKTHTCPPCPAPEAAGGPSVFLFPPKPKDTLMISRTPEVTCVVVDVSHEDPEVKFNWYVDGVEVHNAKTKPREEQYNSTYRVVSVLTVLHQDWLNGKEYKCKVSNKALGAPIEKTISKAKGQPREPQVYTLPPSRDELTKNQVSLTCLVKGFYPSDIAVEWESNGQPENNYKTTPPVLDSDGSFFLYSKLTVDKSRWQQGNVFSCSVMHEALHNHYTQKSLSLSP

SEQ ID NO: 385 - protein, 214 aa, Artificial Sequence; identical to SEQ ID NO: 62
  CD28 (SA_Variant 29) hu IgG1 light chain

SEQ ID NO: 386 - protein, 448 aa, Artificial Sequence; identical to SEQ ID NO: 384
  CD28 (SA_Variant 29) hu IgG1 PGLALA heavy chain

SEQ ID NO: 387 - protein, 15 aa, Artificial Sequence
  Avi tag
GLNDIFEAQKIEWHE

SEQ ID NO: 388 - protein, 679 aa, Artificial Sequence
  CD28 VHCH1 "EE"-(G4S)2- FAP (4B9)-VHCH1 "EE" - Fc knob PGLALA
QVQLVQSGAEVKKPGASVKVSCKASGYTFTSYYIHWVRQAPGQGLEWIGCIYPGNVNTNYNEKFKDRATLTVDTSISTAYMELSRLRSDDTAVYFCTRSHYGLDWNFDVWGQGTTVTVSSASTKGPSVFPLAPSSKSTSGGTAALGCLVEDYFPEPVTVSWNSGALTSGVHTFPAVLQSSGLYSLSSVVTVPSSSLGTQTYICNVNHKPSNTKVDEKVEPKSCDGGGGSGGGGSEVQLLESGGGLVQPGGSLRLSCAASGFTFSSYAMSWVRQAPGKGLEWVSAIIGSGASTYYADSVKGRFTISRDNSKNTLYLQMNSLRAEDTAVYYCAKGWFGGFNYWGQGTLVTVSSASTKGPSVFPLAPSSKSTSGGTAALGCLVEDYFPEPVTVSWNSGALTSGVHTFPAVLQSSGLYSLSSVVTVPSSSLGTQTYICNVNHKPSNTKVDEKVEPKSCDKTHTCPPCPAPEAAGGPSVFLFPPKPKDTLMISRTPEVTCVVVDVSHEDPEVKFNWYVDGVEVHNAKTKPREEQYNSTYRVVSVLTVLHQDWLNGKEYKCKVSNKALGAPIEKTISKAKGQPREPQVYTLPPCRDELTKNQVSLWCLVKGFYPSDIAVEWESNGQPENNYKTTPPVLDSDGSFFLYSKLTVDKSRWQQGNVFSCSVMHEALHNHYTQKSLSLSP

SEQ ID NO: 389 - protein, 439 aa, Artificial Sequence
  CD28 VLCL "RK"-(G4S)2- FAP (4B9)-VLCL "RK"
DIQMTQSPSSLSASVGDRVTITCHASQNIYVWLNWYQQKPGKAPKLLIYKASNLHTGVPSRFSGSGSGTDFTLTISSLQPEDFATYYCQQGQTYPYTFGGGTKVEIKRTVAAPSVFIFPPSDRKLKSGTASVVCLLNNFYPREAKVQWKVDNALQSGNSQESVTEQDSKDSTYSLSSTLTLSKADYEKHKVYACEVTHQGLSSPVTKSFNRGECGGGGSGGGGSEIVLTQSPGTLSLSPGERATLSCRASQSVTSSYLAWYQQKPGQAPRLLINVGSRRATGIPDRFSGSGSGTDFTLTISRLEPEDFAVYYCQQGIMLPPTFGQGTKVEIKRTVAAPSVFIFPPSDRKLKSGTASVVCLLNNFYPREAKVQWKVDNALQSGNSQESVTEQDSKDSTYSLSSTLTLSKADYEKHKVYACEVTHQGLSSPVTKSFNRGEC

SEQ ID NO: 390 - protein, 455 aa, Artificial Sequence
  EpCAM (MT201) hu IgG1 VH-CH1 "EE" Fc hole PGLALA
EVQLLESGGGVVQPGRSLRLSCAASGFTFSSYGMHWVRQAPGKGLEWVAVISYDGSNKYYADSVKGRFTISRDNSKNTLYLQMNSLRAEDTAVYYCAKDMGWGSGWRPYYYYGMDVWGQGTTVTVSSASTKGPSVFPLAPSSKSTSGGTAALGCLVEDYFPEPVTVSWNSGALTSGVHTFPAVLQSSGLYSLSSVVTVPSSSLGTQTYICNVNHKPSNTKVDEKVEPKSCDKTHTCPPCPAPEAAGGPSVFLFPPKPKDTLMISRTPEVTCVVVDVSHEDPEVKFNWYVDGVEVHNAKTKPREEQYNSTYRVVSVLTVLHQDWLNGKEYKCKVSNKALGAPIEKTISKAKGQPREPQVCTLPPSRDELTKNQVSLSCAVKGFYPSDIAVEWESNGQPENNYKTTPPVLDSDGSFFLVSKLTVDKSRWQQGNVFSCSVMHEALHNHYTQKSLSLSP

SEQ ID NO: 391 - protein, 214 aa, Artificial Sequence
  EpCAM(MT201) VL-Ckappa "RK"
ELQMTQSPSSLSASVGDRVTITCRTSQSISSYLNWYQQKPGQPPKLLIYWASTRESGVPDRFSGSGSGTDFTLTISSLQPEDSATYYCQQSYDIPYTFGQGTKLEIKRTVAAPSVFIFPPSDRKLKSGTASVVCLLNNFYPREAKVQWKVDNALQSGNSQESVTEQDSKDSTYSLSSTLTLSKADYEKHKVYACEVTHQGLSSPVTKSFNRGEC

SEQ ID NO: 392 - protein, 443 aa, Artificial Sequence
  HER3 VL-CH1 hu IgG1 Fc hole PGLALA
DIVMTQSPDSLAVSLGERATINCKSSQSVLNSGNQKNYLTWYQQKPGQPPKLLIYWASTRESGVPDRFSGSGSGTDFTLTISSLQAEDVAVYYCQSDYSYPYTFGQGTKLEIKSSASTKGPSVFPLAPSSKSTSGGTAALGCLVKDYFPEPVTVSWNSGALTSGVHTFPAVLQSSGLYSLSSVVTVPSSSLGTQTYICNVNHKPSNTKVDKKVEPKSCDKTHTCPPCPAPEAAGGPSVFLFPPKPKDTLMISRTPEVTCVVVDVSHEDPEVKFNWYVDGVEVHNAKTKPREEQYNSTYRVVSVLTVLHQDWLNGKEYKCKVSNKALGAPIEKTISKAKGQPREPQVCTLPPSRDELTKNQVSLSCAVKGFYPSDIAVEWESNGQPENNYKTTPPVLDSDGSFFLVSKLTVDKSRWQQGNVFSCSVMHEALHNHYTQKSLSLSP

SEQ ID NO: 393 - protein, 227 aa, Artificial Sequence
  HER3 VH-Ckappa
QVQLVQSGAEVKKPGASVKVSCKASGYTFRSSYISWVRQAPGQGLEWMGWIYAGTGSPSYNQKLQGRVTMTTDTSTSTAYMELRSLRSDDTAVYYCARHRDYYSNSLTYWGQGTLVTVSSASVAAPSVFIFPPSDEQLKSGTASVVCLLNNFYPREAKVQWKVDNALQSGNSQESVTEQDSKDSTYSLSSTLTLSKADYEKHKVYACEVTHQGLSSPVTKSFNRGEC

SEQ ID NO: 394 - protein, 441 aa, Artificial Sequence
  CD30 VL-CH1 hu IgG1 Fc hole PGLALA
DIVLTQSPASLAVSLGQRATISCKASQSVDFDGDSYMNWYQQKPGQPPKVLIYAASNLESGIPARFSGSGSGTDFTLNIHPVEEEDAATYYCQQSNEDPWTFGGGTKLEIKSSASTKGPSVFPLAPSSKSTSGGTAALGCLVKDYFPEPVTVSWNSGALTSGVHTFPAVLQSSGLYSLSSVVTVPSSSLGTQTYICNVNHKPSNTKVDKKVEPKSCDKTHTCPPCPAPEAAGGPSVFLFPPKPKDTLMISRTPEVTCVVVDVSHEDPEVKFNWYVDGVEVHNAKTKPREEQYNSTYRVVSVLTVLHQDWLNGKEYKCKVSNKALGAPIEKTISKAKGQPREPQVCTLPPSRDELTKNQVSLSCAVKGFYPSDIAVEWESNGQPENNYKTTPPVLDSDGSFFLVSKLTVDKSRWQQGNVFSCSVMHEALHNHYTQKSLSLSP

SEQ ID NO: 395 - protein, 224 aa, Artificial Sequence
  CD30 VH-Ckappa
QIQLQQSGPEVVKPGASVKISCKASGYTFTDYYITWVKQKPGQGLEWIGWIYPGSGNTKYNEKFKGKATLTVDTSSSTAFMQLSSLTSEDTAVYFCANYGNYWFAYWGQGTQVTVSAASVAAPSVFIFPPSDEQLKSGTASVVCLLNNFYPREAKVQWKVDNALQSGNSQESVTEQDSKDSTYSLSSTLTLSKADYEKHKVYACEVTHQGLSSPVTKSFNRGEC

SEQ ID NO: 396 - protein, 437 aa, Artificial Sequence
  TPBG VL-CH1 hu IgG1 Fc hole PGLALA
DIQMTQSPSSLSASVGDRVTITCQASQDISNYLNWYQQKPGKAPKLLIYAASTLQIGVPSRFSGSGSGTDFTFTISSLQPEDFATYYCQQANSFPLTFGGGTKVEIKSSASTKGPSVFPLAPSSKSTSGGTAALGCLVKDYFPEPVTVSWNSGALTSGVHTFPAVLQSSGLYSLSSVVTVPSSSLGTQTYICNVNHKPSNTKVDKKVEPKSCDKTHTCPPCPAPEAAGGPSVFLFPPKPKDTLMISRTPEVTCVVVDVSHEDPEVKFNWYVDGVEVHNAKTKPREEQYNSTYRVVSVLTVLHQDWLNGKEYKCKVSNKALGAPIEKTISKAKGQPREPQVCTLPPSRDELTKNQVSLSCAVKGFYPSDIAVEWESNGQPENNYKTTPPVLDSDGSFFLVSKLTVDKSRWQQGNVFSCSVMHEALHNHYTQKSLSLSP

SEQ ID NO: 397 - protein, 231 aa, Artificial Sequence
  TPBG VH-Ckappa
EVHLLESGGGLVHPGGSLRLSCAASGFTFRSDAMHWVRQAPGKGLEWVSGVSGSGGSPYYADSVKGRFTISRDDSKTTLYLQMNSLRAEDTAVYYCATGGSIAGSYYYYPMDVWGQGTTVTVSSASVAAPSVFIFPPSDEQLKSGTASVVCLLNNFYPREAKVQWKVDNALQSGNSQESVTEQDSKDSTYSLSSTLTLSKADYEKHKVYACEVTHQGLSSPVTKSFNRGEC

SEQ ID NO: 398 - protein, 445 aa, Artificial Sequence
  GPRC5D (5E11) hu IgG1 VH-CH1 "EE" Fc hole PGLALA
EVQLLESGGGLVQPGGSLRLSCAASGFTFSKYAMAWVRQAPGKGLEWVASISTGGVNTYYADSVKGRFTISRDNSKNTLYLQMNSLRAEDTAVYYCATHTGDYFDYWGQGTMVTVSSASTKGPSVFPLAPSSKSTSGGTAALGCLVEDYFPEPVTVSWNSGALTSGVHTFPAVLQSSGLYSLSSVVTVPSSSLGTQTYICNVNHKPSNTKVDEKVEPKSCDKTHTCPPCPAPEAAGGPSVFLFPPKPKDTLMISRTPEVTCVVVDVSHEDPEVKFNWYVDGVEVHNAKTKPREEQYNSTYRVVSVLTVLHQDWLNGKEYKCKVSNKALGAPIEKTISKAKGQPREPQVCTLPPSRDELTKNQVSLSCAVKGFYPSDIAVEWESNGQPENNYKTTPPVLDSDGSFFLVSKLTVDKSRWQQGNVFSCSVMHEALHNHYTQKSLSLSP

SEQ ID NO: 399 - protein, 218 aa, Artificial Sequence
  GPRC5D (5E11)VL-Ckappa "RK"
EIVLTQSPGTLSLSPGERATLSCRASQSVSISGINLMNWYQQKPGQQPKLLIYHASILASGIPDRFSGSGSGTDFTLTISRLEPEDFAVYYCQQTRESPLTFGQGTRLEIKRTVAAPSVFIFPPSDRKLKSGTASVVCLLNNFYPREAKVQWKVDNALQSGNSQESVTEQDSKDSTYSLSSTLTLSKADYEKHKVYACEVTHQGLSSPVTKSFNRGEC

SEQ ID NO: 400 - protein, 437 aa, Artificial Sequence
  CD38 VL-CH1 hu IgG1 Fc hole PGLALA
EIVLTQSPATLSLSPGERATLSCRASQSVSSYLAWYQQKPGQAPRLLIYDASNRATGIPARFSGSGSGTDFTLTISSLEPEDFAVYYCQQRSNWPPTFGQGTKVEIKSSASTKGPSVFPLAPSSKSTSGGTAALGCLVKDYFPEPVTVSWNSGALTSGVHTFPAVLQSSGLYSLSSVVTVPSSSLGTQTYICNVNHKPSNTKVDKKVEPKSCDKTHTCPPCPAPEAAGGPSVFLFPPKPKDTLMISRTPEVTCVVVDVSHEDPEVKFNWYVDGVEVHNAKTKPREEQYNSTYRVVSVLTVLHQDWLNGKEYKCKVSNKALGAPIEKTISKAKGQPREPQVCTLPPSRDELTKNQVSLSCAVKGFYPSDIAVEWESNGQPENNYKTTPPVLDSDGSFFLVSKLTVDKSRWQQGNVFSCSVMHEALHNHYTQKSLSLSP

SEQ ID NO: 401 - protein, 229 aa, Artificial Sequence
  CD38 VH-Ckappa
EVQLLESGGGLVQPGGSLRLSCAVSGFTFNSFAMSWVRQAPGKGLEWVSAISGSGGGTYYADSVKGRFTISRDNSKNTLYLQMNSLRAEDTAVYFCAKDKILWFGEPVFDYWGQGTLVTVSSASVAAPSVFIFPPSDEQLKSGTASVVCLLNNFYPREAKVQWKVDNALQSGNSQESVTEQDSKDSTYSLSSTLTLSKADYEKHKVYACEVTHQGLSSPVTKSFNRGEC

SEQ ID NO: 402 - protein, 443 aa, Artificial Sequence
  BCMA hu IgG1 VH-CH1 "EE" Fc hole PGLALA
EVQLLESGGGLVQPGGSLRLSCAASGFTFSSYAMNWVRQAPGKGLEWVSAITASGGSTYYADSVKGRFTISRDNSKNTLYLQMNSLRAEDTAVYYCARYWPMSLWGQGTLVTVSSASTKGPSVFPLAPSSKSTSGGTAALGCLVEDYFPEPVTVSWNSGALTSGVHTFPAVLQSSGLYSLSSVVTVPSSSLGTQTYICNVNHKPSNTKVDEKVEPKSCDKTHTCPPCPAPEAAGGPSVFLFPPKPKDTLMISRTPEVTCVVVDVSHEDPEVKFNWYVDGVEVHNAKTKPREEQYNSTYRVVSVLTVLHQDWLNGKEYKCKVSNKALGAPIEKTISKAKGQPREPQVCTLPPSRDELTKNQVSLSCAVKGFYPSDIAVEWESNGQPENNYKTTPPVLDSDGSFFLVSKLTVDKSRWQQGNVFSCSVMHEALHNHYTQKSLSLSP

SEQ ID NO: 403 - protein, 215 aa, Artificial Sequence
  BCMA VL-Ckappa "RK"
EIVLTQSPGTLSLSPGERATLSCRASQSVSAYYLAWYQQKPGQAPRLLMYDASIRATGIPDRFSGSGSGTDFTLTISRLEPEDFAVYYCQQYERWPLTFGQGTKVEIKRTVAAPSVFIFPPSDRKLKSGTASVVCLLNNFYPREAKVQWKVDNALQSGNSQESVTEQDSKDSTYSLSSTLTLSKADYEKHKVYACEVTHQGLSSPVTKSFNRGEC

SEQ ID NO: 404 - protein, 670 aa, Artificial Sequence
  GPRC5D (5E11) VH-CH1(EE)-CD3 VL-CH1-Fc (knob, P329G LALA) (GPRC5D TCB)
EVQLLESGGGLVQPGGSLRLSCAASGFTFSKYAMAWVRQAPGKGLEWVASISTGGVNTYYADSVKGRFTISRDNSKNTLYLQMNSLRAEDTAVYYCATHTGDYFDYWGQGTMVTVSSASTKGPSVFPLAPSSKSTSGGTAALGCLVEDYFPEPVTVSWNSGALTSGVHTFPAVLQSSGLYSLSSVVTVPSSSLGTQTYICNVNHKPSNTKVDEKVEPKSCDGGGGSGGGGSQAVVTQEPSLTVSPGGTVTLTCGSSTGAVTTSNYANWVQEKPGQAFRGLIGGTNKRAPGTPARFSGSLLGGKAALTLSGAQPEDEAEYYCALWYSNLWVFGGGTKLTVLSSASTKGPSVFPLAPSSKSTSGGTAALGCLVKDYFPEPVTVSWNSGALTSGVHTFPAVLQSSGLYSLSSVVTVPSSSLGTQTYICNVNHKPSNTKVDKKVEPKSCDKTHTCPPCPAPEAAGGPSVFLFPPKPKDTLMISRTPEVTCVVVDVSHEDPEVKFNWYVDGVEVHNAKTKPREEQYNSTYRVVSVLTVLHQDWLNGKEYKCKVSNKALGAPIEKTISKAKGQPREPQVYTLPPCRDELTKNQVSLWCLVKGFYPSDIAVEWESNGQPENNYKTTPPVLDSDGSFFLYSKLTVDKSRWQQGNVFSCSVMHEALHNHYTQKSLSLSP

SEQ ID NO: 405 - protein, 232 aa, Artificial Sequence
  CD3 VH-CL (GPRC5D TCB)
EVQLLESGGGLVQPGGSLRLSCAASGFQFSSYAMNWVRQAPGKGLEWVSRIRSKYNNYATYYADSVKGRFTISRDDSKNTLYLQMNSLRAEDTAVYYCVRHTTFPSSYVSYYGYWGQGTLVTVSSASVAAPSVFIFPPSDEQLKSGTASVVCLLNNFYPREAKVQWKVDNALQSGNSQESVTEQDSKDSTYSLSSTLTLSKADYEKHKVYACEVTHQGLSSPVTKSFNRGEC

SEQ ID NO: 406 - protein, 5 aa, Artificial Sequence
  CD19 (8B8-2B11) CDR-H1
DYIMH

SEQ ID NO: 407 - protein, 17 aa, Artificial Sequence
  CD19 (8B8-2B11) CDR-H2
YINPYNDGSKYTEKFQG

SEQ ID NO: 408 - protein, 12 aa, Artificial Sequence
  CD19 (8B8-2B11) CDR-H3
GTYYYGPQLFDY

SEQ ID NO: 409 - protein, 16 aa, Artificial Sequence
  CD19 (8B8-2B11) CDR-L1
KSSQSLETSTGTTYLN

SEQ ID NO: 410 - protein, 7 aa, Artificial Sequence
  CD19 (8B8-2B11) CDR-L2
RVSKRFS

SEQ ID NO: 411 - protein, 9 aa, Artificial Sequence
  CD19 (8B8-2B11) CDR-L3
LQLLEDPYT

SEQ ID NO: 412 - protein, 121 aa, Artificial Sequence
  CD19 (8B8-2B11) VH
QVQLVQSGAEVKKPGASVKVSCKASGYTFTDYIMHWVRQAPGQGLEWMGYINPYNDGSKYTEKFQGRVTMTSDTSISTAYMELSRLRSDDTAVYYCARGTYYYGPQLFDYWGQGTTVTVSS

SEQ ID NO: 413 - protein, 112 aa, Artificial Sequence
  CD19 (8B8-2B11) VL
DIVMTQTPLSLSVTPGQPASISCKSSQSLETSTGTTYLNWYLQKPGQSPQLLIYRVSKRFSGVPDRFSGSGSGTDFTLKISRVEAEDVGVYYCLQLLEDPYTFGQGTKLEIK

SEQ ID NO: 414 - protein, 5 aa, Artificial Sequence
  CD19 (8B8-018) CDR-H1
DYIMH

SEQ ID NO: 415 - protein, 17 aa, Artificial Sequence
  CD19 (8B8-018) CDR-H2
YINPYNDGSKYTEKFQG

SEQ ID NO: 416 - protein, 12 aa, Artificial Sequence
  CD19 (8B8-018) CDR-H3
GTYYYGSALFDY

SEQ ID NO: 417 - protein, 16 aa, Artificial Sequence
  CD19 (8B8-018) CDR-L1
KSSQSLENPNGNTYLN

SEQ ID NO: 418 - protein, 7 aa, Artificial Sequence
  CD19 (8B8-018) CDR-L2
RVSKRFS

SEQ ID NO: 419 - protein, 9 aa, Artificial Sequence
  CD19 (8B8-018) CDR-L3
LQLTHVPYT

SEQ ID NO: 420 - protein, 121 aa, Artificial Sequence
  CD19 (8B8-018) VH
QVQLVQSGAEVKKPGASVKVSCKASGYTFTDYIMHWVRQAPGQGLEWMGYINPYNDGSKYTEKFQGRVTMTSDTSISTAYMELSRLRSDDTAVYYCARGTYYYGSALFDYWGQGTTVTVSS

SEQ ID NO: 421 - protein, 112 aa, Artificial Sequence
  CD19 (8B8-018) VL
DIVMTQTPLSLSVTPGQPASISCKSSQSLENPNGNTYLNWYLQKPGQSPQLLIYRVSKRFSGVPDRFSGSGSGTDFTLKISRVEAEDVGVYYCLQLTHVPYTFGQGTKLEIK

SEQ ID NO: 422 - protein, 5 aa, Artificial Sequence
  CD79b (huMA79b.v28) CDR-H1
SYWIE

SEQ ID NO: 423 - protein, 17 aa, Artificial Sequence
  CD79b (huMA79b.v28) CDR-H2
EILPGGGDTNYNEIFKG

SEQ ID NO: 424 - protein, 8 aa, Artificial Sequence
  CD79b (huMA79b.v28) CDR-H3
RVPIRLDY

SEQ ID NO: 425 - protein, 15 aa, Artificial Sequence
  CD79b (huMA79b.v28) CDR-L1
KASQSVDYEGDSFLN

SEQ ID NO: 426 - protein, 7 aa, Artificial Sequence
  CD79b (huMA79b.v28) CDR-L2
AASNLES

SEQ ID NO: 427 - protein, 9 aa, Artificial Sequence
  CD79b (huMA79b.v28) CDR-L3
QQSNEDPLT

SEQ ID NO: 428 - protein, 117 aa, Artificial Sequence [sequence omitted]

SEQ ID NO: 429 - protein, 111 aa, Artificial Sequence [sequence omitted]

SEQ ID NO: 430 - protein, 442 aa, Artificial Sequence
  VL (CD19 2B11) -CH1 Fc hole PGLALA
DIVMTQTPLSLSVTPGQPASISCKSSQSLETSTGTTYLNWYLQKPGQSPQLLIYRVSKRFSGVPDRFSGSGSGTDFTLKISRVEAEDVGVYYCLQLLEDPYTFGQGTKLEIKSSASTKGPSVFPLAPSSKSTSGGTAALGCLVKDYFPEPVTVSWNSGALTSGVHTFPAVLQSSGLYSLSSVVTVPSSSLGTQTYICNVNHKPSNTKVDKKVEPKSCDKTHTCPPCPAPEAAGGPSVFLFPPKPKDTLMISRTPEVTCVVVDVSHEDPEVKFNWYVDGVEVHNAKTKPREEQYNSTYRVVSVLTVLHQDWLNGKEYKCKVSNKALGAPIEKTISKAKGQPREPQVCTLPPSRDELTKNQVSLSCAVKGFYPSDIAVEWESNGQPENNYKTTPPVLDSDGSFFLVSKLTVDKSRWQQGNVFSCSVMHEALHNHYTQKSLSLSP

SEQ ID NO: 431 - protein, 228 aa, Artificial Sequence
  VH (CD19 2B11) CL
QVQLVQSGAEVKKPGASVKVSCKASGYTFTDYIMHWVRQAPGQGLEWMGYINPYNDGSKYTEKFQGRVTMTSDTSISTAYMELSRLRSDDTAVYYCARGTYYYGPQLFDYWGQGTTVTVSSASVAAPSVFIFPPSDEQLKSGTASVVCLLNNFYPREAKVQWKVDNALQSGNSQESVTEQDSKDSTYSLSSTLTLSKADYEKHKVYACEVTHQGLSSPVTKSFNRGEC

SEQ ID NO: 432 - protein, 441 aa, Artificial Sequence
  VL (huMA79b.v28) -CH1 Fc hole PGLALA
DIQLTQSPSSLSASVGDRVTITCKASQSVDYEGDSFLNWYQQKPGKAPKLLIYAASNLESGVPSRFSGSGSGTDFTLTISSLQPEDFATYYCQQSNEDPLTFGQGTKVEIKSSASTKGPSVFPLAPSSKSTSGGTAALGCLVKDYFPEPVTVSWNSGALTSGVHTFPAVLQSSGLYSLSSVVTVPSSSLGTQTYICNVNHKPSNTKVDKKVEPKSCDKTHTCPPCPAPEAAGGPSVFLFPPKPKDTLMISRTPEVTCVVVDVSHEDPEVKFNWYVDGVEVHNAKTKPREEQYNSTYRVVSVLTVLHQDWLNGKEYKCKVSNKALGAPIEKTISKAKGQPREPQVCTLPPSRDELTKNQVSLSCAVKGFYPSDIAVEWESNGQPENNYKTTPPVLDSDGSFFLVSKLTVDKSRWQQGNVFSCSVMHEALHNHYTQKSLSLSP

SEQ ID NO: 433 - protein, 224 aa, Artificial Sequence
  VH (huMA79b.v28) CL
EVQLVESGGGLVQPGGSLRLSCAASGYTFSSYWIEWVRQAPGKGLEWIGEILPGGGDTNYNEIFKGRATFSADTSKNTAYLQMNSLRAEDTAVYYCTRRVPIRLDYWGQGTLVTVSSASVAAPSVFIFPPSDEQLKSGTASVVCLLNNFYPREAKVQWKVDNALQSGNSQESVTEQDSKDSTYSLSSTLTLSKADYEKHKVYACEVTHQGLSSPVTKSFNRGEC

SEQ ID NO: 434 - protein, 556 aa, Homo sapiens [sequence omitted]

SEQ ID NO: 435 - protein, 229 aa, Homo sapiens
MARLALSPVPSHWMVALLLLLSAEPVPAARSEDRYRNPKGSACSRIWQSPRFIARKRGFTVKMHCYMNSASGNVSWLWKQEMDENPQQLKLEKGRMEESQNESLATLTIQGIRFEDNGIYFCQQKCNNTSEVYQGCGTELRVMGFSTLAQLKQRNTLKDGIIMIQTLLIILFIIVPIFLLLDKDDSKAGMEEDHTYEGLDIDQTATYEDIVTLRTGEVKWSVGEHPGQE

SEQ ID NO: 436 - protein, 297 aa, Homo sapiens
MTTPRNSVNGTFPAEPMKGPIAMQSGPKPLFRRMSSLVGPTQSFFMRESKTLGAVQIMNGLFHIALGGLLMIPAGIYAPICVTVWYPLWGGIMYIISGSLLAATEKNSRKCLVKGKMIMNSLSLFAAISGMILSIMDILNIKISHFLKMESLNFIRAHTPYINIYNCEPANPSEKNSPSTQYCYSIQSLFLGILSVMLIFAFFQELVIAGIVENEWKRTCSRPKSNIVLLSAEEKKEQTIEIKEEVVGLTETSSQPKNEEDIEIIPIQEEEEEETETNFPEPPQDQESSPIENDSSP

SEQ ID NO: 437 - protein, 847 aa, Homo sapiens
MHLLGPWLLLLVLEYLAFSDSSKWVFEHPETLYAWEGACVWIPCTYRALDGDLESFILFHNPEYNKNTSKFDGTRLYESTKDGKVPSEQKRVQFLGDKNKNCTLSIHPVHLNDSGQLGLRMESKTEKWMERIHLNVSERPFPPHIQLPPEIQESQEVTLTCLLNFSCYGYPIQLQWLLEGVPMRQAAVTSTSLTIKSVFTRSELKFSPQWSHHGKIVTCQLQDADGKFLSNDTVQLNVKHTPKLEIKVTPSDAIVREGDSVTMTCEVSSSNPEYTTVSWLKDGTSLKKQNTFTLNLREVTKDQSGKYCCQVSNDVGPGRSEEVFLQVQYAPEPSTVQILHSPAVEGSQVEFLCMSLANPLPTNYTWYHNGKEMQGRTEEKVHIPKILPWHAGTYSCVAENILGTGQRGPGAELDVQYPPKKVTTVIQNPMPIREGDTVTLSCNYNSSNPSVTRYEWKPHGAWEEPSLGVLKIQNVGWDNTTIACAACNSWCSWASPVALNVQYAPRDVRVRKIKPLSEIHSGNSVSLQCDFSSSHPKEVQFFWEKNGRLLGKESQLNFDSISPEDAGSYSCWVNNSIGQTASKAWTLEVLYAPRRLRVSMSPGDQVMEGKSATLTCESDANPPVSHYTWFDWNNQSLPYHSQKLRLEPVKVQHSGAYWCQGTNSVGKGRSPLSTLTVYYSPETIGRRVAVGLGSCLAILILAICGLKLQRRWKRTQSQQGLQENSSGQSFFVRNKKVRRAPLSEGPHSLGCYNPMMEDGISYTTLRFPEMNIPRTGDAESSEMQRPPPDCDDTVTYSALHKRQVGDYENVIPDFPEDEGIHYSELIQFGVGERPQAQENVDYVILKH

SEQ ID NO: 438 - protein, 281 aa, Homo sapiens
MSAQESCLSLIKYFLFVFNLFFFVLGSLIFCFGIWILIDKTSFVSFVGLAFVPLQIWSKVLAISGIFTMGIALLGCVGALKELRCLLGLYFGMLLLLFATQITLGILISTQRAQLERSLRDVVEKTIQKYGTNPEETAAEESWDYVQFQLRCCGWHYPQDWFQVLILRGNGSEAHRVPCSCYNLSATNDSTILDKVILPQLSRLGHLARSRHSADICAVPAESHIYREGCAQGLQKWLHNNLISIVGICLGVGLLELGFMTLSIFLCRNLDHVYNRLARYR

SEQ ID NO: 439 - protein, 5 aa, Artificial Sequence
  CD3-HCDR1
TYAMN

SEQ ID NO: 440 - protein, 19 aa, Artificial Sequence
  CD3-HCDR2
RIRSKYNNYATYYADSVKG

SEQ ID NO: 441 - protein, 14 aa, Artificial Sequence
  CD3-HCDR3
HGNFGNSYVSWFAY

SEQ ID NO: 442 - protein, 14 aa, Artificial Sequence
  CD3-LCDR1
GSSTGAVTTSNYAN

SEQ ID NO: 443 - protein, 7 aa, Artificial Sequence
  CD3-LCDR2
GTNKRAP

SEQ ID NO: 444 - protein, 9 aa, Artificial Sequence
  CD3-LCDR3
ALWYSNLWV

SEQ ID NO: 445 - protein, 125 aa, Artificial Sequence
  CD3 VH
EVQLLESGGGLVQPGGSLRLSCAASGFTFSTYAMNWVRQAPGKGLEWVSRIRSKYNNYATYYADSVKGRFTISRDDSKNTLYLQMNSLRAEDTAVYYCVRHGNFGNSYVSWFAYWGQGTLVTVSS

SEQ ID NO: 446 - protein, 109 aa, Artificial Sequence
  CD3 VL
QAVVTQEPSLTVSPGGTVTLTCGSSTGAVTTSNYANWVQEKPGQAFRGLIGGTNKRAPGTPARFSGSLLGGKAALTLSGAQPEDEAEYYCALWYSNLWVFGGGTKLTVL

SEQ ID NO: 447 - protein, 5 aa, Artificial Sequence
  CD20-HCDR1
YSWIN

SEQ ID NO: 448 - protein, 16 aa, Artificial Sequence
  CD20-HCDR2
RIFPGDGDTDYNGKFK

SEQ ID NO: 449 - protein, 10 aa, Artificial Sequence
  CD20-HCDR3
NVFDGYWLVY

SEQ ID NO: 450 - protein, 16 aa, Artificial Sequence
  CD20-LCDR1
RSSKSLLHSNGITYLY

SEQ ID NO: 451 - protein, 7 aa, Artificial Sequence
  CD20-LCDR2
QMSNLVS

SEQ ID NO: 452 - protein, 9 aa, Artificial Sequence
  CD20-LCDR3
AQNLELPYT

SEQ ID NO: 453 - protein, 119 aa, Artificial Sequence
  CD20 VH
QVQLVQSGAEVKKPGSSVKVSCKASGYAFSYSWINWVRQAPGQGLEWMGRIFPGDGDTDYNGKFKGRVTITADKSTSTAYMELSSLRSEDTAVYYCARNVFDGYWLVYWGQGTLVTVSS

SEQ ID NO: 454 - protein, 115 aa, Artificial Sequence
  CD20 VL
DIVMTQTPLSLPVTPGEPASISCRSSKSLLHSNGITYLYWYLQKPGQSPQLLIYQMSNLVSGVPDRFSGSGSGTDFTLKISRVEAEDVGVYYCAQNLELPYTFGGGTKVEIKRTV

SEQ ID NO: 455 - protein, 672 aa, Artificial Sequence
  CD20 VH-CH1(EE)-CD3 VL-CH1-Fc (knob, P329G LALA)CD20 VH-CH1(EE)-CD3 VL-CH1-Fc (knob, P329G LALA)
QVQLVQSGAEVKKPGSSVKVSCKASGYAFSYSWINWVRQAPGQGLEWMGRIFPGDGDTDYNGKFKGRVTITADKSTSTAYMELSSLRSEDTAVYYCARNVFDGYWLVYWGQGTLVTVSSASTKGPSVFPLAPSSKSTSGGTAALGCLVEDYFPEPVTVSWNSGALTSGVHTFPAVLQSSGLYSLSSVVTVPSSSLGTQTYICNVNHKPSNTKVDEKVEPKSCDGGGGSGGGGSQAVVTQEPSLTVSPGGTVTLTCGSSTGAVTTSNYANWVQEKPGQAFRGLIGGTNKRAPGTPARFSGSLLGGKAALTLSGAQPEDEAEYYCALWYSNLWVFGGGTKLTVLSSASTKGPSVFPLAPSSKSTSGGTAALGCLVKDYFPEPVTVSWNSGALTSGVHTFPAVLQSSGLYSLSSVVTVPSSSLGTQTYICNVNHKPSNTKVDKKVEPKSCDKTHTCPPCPAPEAAGGPSVFLFPPKPKDTLMISRTPEVTCVVVDVSHEDPEVKFNWYVDGVEVHNAKTKPREEQYNSTYRVVSVLTVLHQDWLNGKEYKCKVSNKALGAPIEKTISKAKGQPREPQVYTLPPCRDELTKNQVSLWCLVKGFYPSDIAVEWESNGQPENNYKTTPPVLDSDGSFFLYSKLTVDKSRWQQGNVFSCSVMHEALHNHYTQKSLSLSP

SEQ ID NO: 456 - protein, 447 aa, Artificial Sequence
  CD20 VH-CH1(EE)-Fc (hole, P329G LALA)
QVQLVQSGAEVKKPGSSVKVSCKASGYAFSYSWINWVRQAPGQGLEWMGRIFPGDGDTDYNGKFKGRVTITADKSTSTAYMELSSLRSEDTAVYYCARNVFDGYWLVYWGQGTLVTVSSASTKGPSVFPLAPSSKSTSGGTAALGCLVEDYFPEPVTVSWNSGALTSGVHTFPAVLQSSGLYSLSSVVTVPSSSLGTQTYICNVNHKPSNTKVDEKVEPKSCDKTHTCPPCPAPEAAGGPSVFLFPPKPKDTLMISRTPEVTCVVVDVSHEDPEVKFNWYVDGVEVHNAKTKPREEQYNSTYRVVSVLTVLHQDWLNGKEYKCKVSNKALGAPIEKTISKAKGQPREPQVCTLPPSRDELTKNQVSLSCAVKGFYPSDIAVEWESNGQPENNYKTTPPVLDSDGSFFLVSKLTVDKSRWQQGNVFSCSVMHEALHNHYTQKSLSLSP

SEQ ID NO: 457 - protein, 219 aa, Artificial Sequence
  CD20 VL-CL(RK)
DIVMTQTPLSLPVTPGEPASISCRSSKSLLHSNGITYLYWYLQKPGQSPQLLIYQMSNLVSGVPDRFSGSGSGTDFTLKISRVEAEDVGVYYCAQNLELPYTFGGGTKVEIKRTVAAPSVFIFPPSDRKLKSGTASVVCLLNNFYPREAKVQWKVDNALQSGNSQESVTEQDSKDSTYSLSSTLTLSKADYEKHKVYACEVTHQGLSSPVTKSFNRGEC

SEQ ID NO: 458 - protein, 232 aa, Artificial Sequence; identical to SEQ ID NO: 165
  CD3 VH-CL

SEQ ID NO: 459 - protein, 290 aa, Homo sapiens
MRIFAVFIFMTYWHLLNAFTVTVPKDLYVVEYGSNMTIECKFPVEKQLDLAALIVYWEMEDKNIIQFVHGEEDLKVQHSSYRQRARLLKDQLSLGNAALQITDVKLQDAGVYRCMISYGGADYKRITVKVNAPYNKINQRILVVDPVTSEHELTCQAEGYPKAEVIWTSSDHQVLSGKTTTTNSKREEKLFNVTSTLRINTTTNEIFYCTFRRLDPEENHTAELVIPELPLAHPPNERTHLVILGAILLCLGVALTFIFRLRKGRMMDVKKCGIQDTNSKKQSDTHLEET

SEQ ID NO: 460 - protein, 118 aa, Artificial Sequence [sequence omitted]

SEQ ID NO: 461 - protein, 107 aa, Artificial Sequence [sequence omitted]

SEQ ID NO: 462 - protein, 121 aa, Artificial Sequence
  VH (PD-L1) 2
EVQLVESGGGLVQPGGSLRLSCAASGFTFSRYWMSWVRQAPGKGLEWVANIKQDGSEKYYVDSVKGRFTISRDNAKNSLYLQMNSLRAEDTAVYYCAREGGWFGELAFDYWGQGTLVTVSS

SEQ ID NO: 463 - protein, 108 aa, Artificial Sequence
  VL (PD-L1) 2
EIVLTQSPGTLSLSPGERATLSCRASQRVSSSYLAWYQQKPGQAPRLLIYDASSRATGIPDRFSGSGSGTDFTLTISRLEPEDFAVYYCQQYGSLPWTFGQGTKVEIK

SEQ ID NO: 464 - protein, 288 aa, Homo sapiens
MQIPQAPWPVVWAVLQLGWRPGWFLDSPDRPWNPPTFSPALLVVTEGDNATFTCSFSNTSESFVLNWYRMSPSNQTDKLAAFPEDRSQPGQDCRFRVTQLPNGRDFHMSVVRARRNDSGTYLCGAISLAPKAQIKESLRAELRVTERRAEVPTAHPSPSPRPAGQFQTLVVGVVGGLLGSLVLLVWVLAVICSRAARGTIGARRTGQPLKEDPSAVPVFSVDYGELDFQWREKTPEPPVPCVPEQTEYATIVFPSGMGTSSPARRGSADGPRSAQPLRPEDGHCSWPL

SEQ ID NO: 465 - protein, 120 aa, Artificial Sequence [sequence omitted]

SEQ ID NO: 466 - protein, 111 aa, Artificial Sequence [sequence omitted]

SEQ ID NO: 467 - protein, 113 aa, Artificial Sequence [sequence omitted]

SEQ ID NO: 468 - protein, 107 aa, Artificial Sequence [sequence omitted]

SEQ ID NO: 469 - protein, 314 aa, Homo sapiens
MAPPQVLAFGLLLAAATATFAAAQEECVCENYKLAVNCFVNNNRQCQCTSVGAQNTVICSKLAAKCLVMKAEMNGSKLGRRAKPEGALQNNDGLYDPDCDESGLFKAKQCNGTSMCWCVNTAGVRRTDKDTEITCSERVRTYWIIIELKHKAREKPYDSKSLRTALQKEITTRYQLDPKFITSILYENNVITIDLVQNSSQKTQNDVDIADVAYYFEKDVKGESLFHSKKMDLTVNGEQLDLDPGQTLIYYVDEKAPEFSMQGLKAGVIAVIVVVVIAVVAGIVVLVISRKKRMAKYEKAEIKEMGEMHRELNA

SEQ ID NO: 470 - protein, 315 aa, Mus musculus
MAGPQALAFGLLLAVVTATLAAAQRDCVCDNYKLATSCSLNEYGECQCTSYGTQNTVICSKLASKCLAMKAEMTHSKSGRRIKPEGAIQNNDGLYDPDCDEQGLFKAKQCNGTATCWCVNTAGVRRTDKDTEITCSERVRTYWIIIELKHKERESPYDHQSLQTALQEAFTSRYKLNQKFIKNIMYENNVITIDLMQNSSQKTQDDVDIADVAYYFEKDVKGESLFHSSKSMDLRVNGEPLDLDPGQTLIYYVDEKAPEFSMQGLTAGIIAVIVVVSLAVIAGIVVLVISTRKKSAKYEKAEIKEMGEIHRELNA

SEQ ID NO: 471 - protein, 1342 aa, Homo sapiens
MRANDALQVLGLLFSLARGSEVGNSQAVCPGTLNGLSVTGDAENQYQTLYKLYERCEVVMGNLEIVLTGHNADLSFLQWIREVTGYVLVAMNEFSTLPLPNLRVVRGTQVYDGKFAIFVMLNYNTNSSHALRQLRLTQLTEILSGGVYIEKNDKLCHMDTIDWRDIVRDRDAEIVVKDNGRSCPPCHEVCKGRCWGPGSEDCQTLTKTICAPQCNGHCFGPNPNQCCHDECAGGCSGPQDTDCFACRHFNDSGACVPRCPQPLVYNKLTFQLEPNPHTKYQYGGVCVASCPHNFVVDQTSCVRACPPDKMEVDKNGLKMCEPCGGLCPKACEGTGSGSRFQTVDSSNIDGFVNCTKILGNLDFLITGLNGDPWHKIPALDPEKLNVFRTVREITGYLNIQSWPPHMHNFSVFSNLTTIGGRSLYNRGFSLLIMKNLNVTSLGFRSLKEISAGRIYISANRQLCYHHSLNWTKVLRGPTEERLDIKHNRPRRDCVAEGKVCDPLCSSGGCWGPGPGQCLSCRNYSRGGVCVTHCNFLNGEPREFAHEAECFSCHPECQPMEGTATCNGSGSDTCAQCAHFRDGPHCVSSCPHGVLGAKGPIYKYPDVQNECRPCHENCTQGCKGPELQDCLGQTLVLIGKTHLTMALTVIAGLVVIFMMLGGTFLYWRGRRIQNKRAMRRYLERGESIEPLDPSEKANKVLARIFKETELRKLKVLGSGVFGTVHKGVWIPEGESIKIPVCIKVIEDKSGRQSFQAVTDHMLAIGSLDHAHIVRLLGLCPGSSLQLVTQYLPLGSLLDHVRQHRGALGPQLLLNWGVQIAKGMYYLEEHGMVHRNLAARNVLLKSPSQVQVADFGVADLLPPDDKQLLYSEAKTPIKWMALESIHFGKYTHQSDVWSYGVTVWELMTFGAEPYAGLRLAEVPDLLEKGERLAQPQICTIDVYMVMVKCWMIDENIRPTFKELANEFTRMARDPPRYLVIKRESGPGIAPGPEPHGLTNKKLEEVELEPELDLDLDLEAEEDNLATTTLGSALSLPVGTLNRPRGSQSLLSPSSGYMPMNQGNLGESCQESAVSGSSERCPRPVSLHPMPRGCLASESSEGHVTGSEAELQEKVSMCRSRSRSRSPRPRGDSAYHSQRHSLLTPVTPLSPPGLEEEDVNGYVMPDTHLKGTPSSREGTLSSVGLSSVLGTEEEDEDEEYEYMNRRRRHSPPHPPRPSSLEELGYEYMDVGSDLSASLGSTQSCPLHPVPIMPTAGTTPDEDYEYMNRQRDGGGPGGDYAAMGACPASEQGYEEMRAFQGPGHQAPHVHYARLKTLRSLEATDSAFDNPDYWHSRLFPKANAQRT

SEQ ID NO: 472 - protein, 595 aa, Homo sapiens
MRVLLAALGLLFLGALRAFPQDRPFEDTCHGNPSHYYDKAVRRCCYRCPMGLFPTQQCPQRPTDCRKQCEPDYYLDEADRCTACVTCSRDDLVEKTPCAWNSSRVCECRPGMFCSTSAVNSCARCFFHSVCPAGMIVKFPGTAQKNTVCEPASPGVSPACASPENCKEPSSGTIPQAKPTPVSPATSSASTMPVRGGTRLAQEAASKLTRAPDSPSSVGRPSSDPGLSPTQPCPEGSGDCRKQCEPDYYLDEAGRCTACVSCSRDDLVEKTPCAWNSSRTCECRPGMICATSATNSCARCVPYPICAAETVTKPQDMAEKDTTFEAPPLGTQPDCNPTPENGEAPASTSPTQSLLVDSQASKTLPIPTSAPVALSSTGKPVLDAGPVLFWVILVLVVVVGSSAFLLCHRRACRKRIRQKLHLCYPVQTSQPKLELVDSRPRRSSTQLRSGASVTEPVAEERGLMSQPLMETCHSVGAAYLESLPLQDASPAGGPSSPRDLPEPRVSTEHTNNKIEKIYIMKADTVIVGTVKAELPEGRGLAGPAEPELEEELEADHTPHYPEQETEPPLGSCSDVMLSVEEEGKEDPLPTAASGK

SEQ ID NO: 473 - protein, 420 aa, Homo sapiens
MPGGCSRGPAAGDGRLRLARLALVLLGWVSSSSPTSSASSFSSSAPFLASAVSAQPPLPDQCPALCECSEAARTVKCVNRNLTEVPTDLPAYVRNLFLTGNQLAVLPAGAFARRPPLAELAALNLSGSRLDEVRAGAFEHLPSLRQLDLSHNPLADLSPFAFSGSNASVSAPSPLVELILNHIVPPEDERQNRSFEGMVVAALLAGRALQGLRRLELASNHFLYLPRDVLAQLPSLRHLDLSNNSLVSLTYVSFRNLTHLESLHLEDNALKVLHNGTLAELQGLPHIRVFLDNNPWVCDCHMADMVTWLKETEVVQGKDRLTCAYPEKMRNRVLLELNSADLDCDPILPPSLQTSYVFLGIVLALIGAIFLLVLYLNRKGIKKWMHNIRDACRDHMEGYHYRYEINADPRLTNLSSNSDV

SEQ ID NO: 474 - protein, 300 aa, Homo sapiens
MANCEFSPVSGDKPCCRLSRRAQLCLGVSILVLILVVVLAVVVPRWRQQWSGPGTTKRFPETVLARCVKYTEIHPEMRHVDCQSVWDAFKGAFISKHPCNITEEDYQPLMKLGTQTVPCNKILLWSRIKDLAHQFTQVQRDMFTLEDTLLGYLADDLTWCGEFNTSKINYQSCPDWRKDCSNNPVSVFWKTVSRRFAEAACDVVHVMLNGSRSKIFDKNSTFGSVEVHNLQPEKVQTLEAWVIHGGREDSRDLCQDPTIKELESIISKRNIQFSCKNIYRPDKFLQCVKNPEDSSCTSEI

SEQ ID NO: 475 - protein, 184 aa, Homo sapiens
MLQMAGQCSQNEYFDSLLHACIPCQLRCSSNTPPLTCQRYCNASVTNSVKGTNAILWTCLGLSLIISLAVFVLMFLLRKINSEPLKDEFKNTGSGLLGMANIDLEKSRTGDEIILPRGLEYTVEECTCEDCIKSKPKVDSDHCFPLPAMEEGATILVTTKTNDYCKSLPAALSATEIEKSISAR

SEQ ID NO: 476 - protein, 345 aa, Homo sapiens
MYKDCIESTGDYFLLCDAEGPWGIILESLAILGIVVTILLLLAFLFLMRKIQDCSQWNVLPTQLLFLLSVLGLFGLAFAFIIELNQQTAPVRYFLFGVLFALCFSCLLAHASNLVKLVRGCVSFSWTTILCIAIGCSLLQIIIATEYVTLIMTRGMMFVNMTPCQLNVDFVVLLVYVLFLMALTFFVSKATFCGPCENWKQHGRLIFITVLFSIIIWVVWISMLLRGNPQFQRQPQWDDPVVCIALVTNAWVFLLLYIVPELCILYRSCRQECPLQGNACPVTAYQHSFQVENQELSRARDSDGAEEDVALTSYGTPIQPQTVDPTQECFIPQAKLSPQQDAGGV

SEQ ID NO: 477 - protein, 98 aa, Homo sapiens
ASTKGPSVFPLAPSSKSTSGGTAALGCLVKDYFPEPVTVSWNSGALTSGVHTFPAVLQSSGLYSLSSVVTVPSSSLGTQTYICNVNHKPSNTKVDKKV

SEQ ID NO: 478 - protein, 107 aa, Homo sapiens
APELLGGPSVFLFPPKPKDTLMISRTPEVTCVWDVSHEDPEVKFNWYVDGVEVHNAKTKPREEQESTYRWSVLTVLHQDWLNGKEYKCKVSNKALPAPIEKTISKAK

SEQ ID NO: 479 - protein, 106 aa, Homo sapiens [sequence omitted]

SEQ ID NO: 480 - protein, 5 aa, Homo sapiens
EPKSC

SEQ ID NO: 481 - protein, 10 aa, Homo sapiens
  MISC_FEATURE (8)..(8): X is S or P
DKTHTCPXCP

SEQ ID NO: 482 - protein, 7 aa, Homo sapiens
  MISC_FEATURE (5)..(5): X is S or P
HTCPXCP

SEQ ID NO: 483 - protein, 5 aa, Homo sapiens
  MISC_FEATURE (3)..(3): X is S or P
CPXCP

SEQ ID NO: 484 - protein, 330 aa, Homo sapiens [sequence omitted]

SEQ ID NO: 485 - protein, 330 aa, Homo sapiens
ASTKGPSVFPLAPSSKSTSGGTAALGCLVKDYFPEPVTVSWNSGALTSGVHTFPAVLQSSGLYSLSSVVTVPSSSLGTQTYICNVNHKPSNTKVDKKVEPKSCDKTHTCPPCPAPELLGGPSVFLFPPKPKDTLMISRTPEVTCVVVDVSHEDPEVKFNWYVDGVEVHNAKTKPREEQYNSTYRVVSVLTVLHQDWLNGKEYKCKVSNKALPAPIEKTISKAKGQPREPQVYTLPPSREEMTKNQVSLTCLVKGFYPSDIAVEWESNGQPENNYKTTPPVLDSDGSFFLYSKLTVDKSRWQQGNVFSCSVMHEALHNHYTQKSLSLSPGK

SEQ ID NO: 486 - protein, 326 aa, Homo sapiens
ASTKGPSVFPLAPCSRSTSESTAALGCLVKDYFPEPVTVSWNSGALTSGVHTFPAVLQSSGLYSLSSVVTVPSSNFGTQTYTCNVDHKPSNTKVDKTVERKCCVECPPCPAPPVAGPSVFLFPPKPKDTLMISRTPEVTCVVVDVSHEDPEVQFNWYVDGVEVHNAKTKPREEQFNSTFRVVSVLTVVHQDWLNGKEYKCKVSNKGLPAPIEKTISKTKGQPREPQVYTLPPSREEMTKNQVSLTCLVKGFYPSDISVEWESNGQPENNYKTTPPMLDSDGSFFLYSKLTVDKSRWQQGNVFSCSVMHEALHNHYTQKSLSLSPGK

SEQ ID NO: 487 - protein, 377 aa, Homo sapiens
ASTKGPSVFPLAPCSRSTSGGTAALGCLVKDYFPEPVTVSWNSGALTSGVHTFPAVLQSSGLYSLSSVVTVPSSSLGTQTYTCNVNHKPSNTKVDKRVELKTPLGDTTHTCPRCPEPKSCDTPPPCPRCPEPKSCDTPPPCPRCPEPKSCDTPPPCPRCPAPELLGGPSVFLFPPKPKDTLMISRTPEVTCVVVDVSHEDPEVQFKWYVDGVEVHNAKTKPREEQYNSTFRVVSVLTVLHQDWLNGKEYKCKVSNKALPAPIEKTISKTKGQPREPQVYTLPPSREEMTKNQVSLTCLVKGFYPSDIAVEWESSGQPENNYNTTPPMLDSDGSFFLYSKLTVDKSRWQQGNIFSCSVMHEALHNRFTQKSLSLSPGK

SEQ ID NO: 488 - protein, 327 aa, Homo sapiens
ASTKGPSVFPLAPCSRSTSESTAALGCLVKDYFPEPVTVSWNSGALTSGVHTFPAVLQSSGLYSLSSVVTVPSSSLGTKTYTCNVDHKPSNTKVDKRVESKYGPPCPSCPAPEFLGGPSVFLFPPKPKDTLMISRTPEVTCVVVDVSQEDPEVQFNWYVDGVEVHNAKTKPREEQFNSTYRVVSVLTVLHQDWLNGKEYKCKVSNKGLPSSIEKTISKAKGQPREPQVYTLPPSQEEMTKNQVSLTCLVKGFYPSDIAVEWESNGQPENNYKTTPPVLDSDGSFFLYSRLTVDKSRWQEGNVFSCSVMHEALHNHYTQKSLSLSLGK

SEQ ID NO: 489 - protein, 5 aa, Artificial Sequence
  CD28(variant 8) CDR-H1
SYYIH

SEQ ID NO: 490 - protein, 17 aa, Artificial Sequence
  CD28(variant 8) CDR-H2
SIYPGNVQTNYNEKFKD

SEQ ID NO: 491 - protein, 11 aa, Artificial Sequence
  CD28(variant 8) CDR-H3
SHYGLDWNFDV

SEQ ID NO: 492 - protein, 11 aa, Artificial Sequence
  CD28(variant 8) CDR-L1
HASQNIYVYLN

SEQ ID NO: 493 - protein, 7 aa, Artificial Sequence
  CD28(variant 8) CDR-L2
KASNLHT

SEQ ID NO: 494 - protein, 9 aa, Artificial Sequence
  CD28(variant 8) CDR-L3
QQGQTYPYT

SEQ ID NO: 495 - protein, 5 aa, Artificial Sequence
  CD28(variant 15) CDR-H1
SYYIH

SEQ ID NO: 496 - protein, 17 aa, Artificial Sequence
  CD28(variant 15) CDR-H2
SIYPGNVQTNYNEKFKD

SEQ ID NO: 497 - protein, 11 aa, Artificial Sequence
  CD28(variant 15) CDR-H3
SHYGLDWNFDV

SEQ ID NO: 498 - protein, 11 aa, Artificial Sequence
  CD28(variant 15) CDR-L1
HASQNIYVFLN

SEQ ID NO: 499 - protein, 7 aa, Artificial Sequence
  CD28(variant 15) CDR-L2
KASNLHT

SEQ ID NO: 500 - protein, 9 aa, Artificial Sequence
  CD28(variant 15) CDR-L3
QQGQTYPYT

SEQ ID NO: 501 - protein, 5 aa, Artificial Sequence
  CD28(variant 29) CDR-H1
SYYIH

SEQ ID NO: 502 - protein, 17 aa, Artificial Sequence
  CD28(variant 29) CDR-H2
SIYPGNVNTNYNEKFKD

SEQ ID NO: 503 - protein, 11 aa, Artificial Sequence
  CD28(variant 29) CDR-H3
SHYGLDWNFDV

SEQ ID NO: 504 - protein, 11 aa, Artificial Sequence
  CD28(variant 29) CDR-L1
HASQNIYVWLN

SEQ ID NO: 505 - protein, 7 aa, Artificial Sequence
  CD28(variant 29) CDR-L2
KASNLHT

SEQ ID NO: 506 - protein, 9 aa, Artificial Sequence
  CD28(variant 29) CDR-L3
QQGQTYPYT

SEQ ID NO: 507 - protein, 5 aa, Artificial Sequence
  CEA (T84.66-LCHA)- CDR-H1
DTYMH

SEQ ID NO: 508 - protein, 17 aa, Artificial Sequence
  CEA (T84.66-LCHA)- CDR-H2
RIDPANGNSKYVPKFQG

SEQ ID NO: 509 - protein, 12 aa, Artificial Sequence
  CEA (T84.66-LCHA)- CDR-H3
FGYYVSDYAMAY

SEQ ID NO: 510 - protein, 15 aa, Artificial Sequence
  CEA (T84.66-LCHA)- CDR-L1
RAGESVDIFGVGFLH

SEQ ID NO: 511 - protein, 7 aa, Artificial Sequence
  CEA (T84.66-LCHA)- CDR-L2
RASNRAT

SEQ ID NO: 512 - protein, 9 aa, Artificial Sequence
  CEA (T84.66-LCHA)- CDR-L3
QQTNEDPYT

SEQ ID NO: 513 - protein, 121 aa, Artificial Sequence
  CEA (T84.66-LCHA) VH
QVQLVQSGAEVKKPGSSVKVSCKASGFNIKDTYMHWVRQAPGQGLEWMGRIDPANGNSKYVPKFQGRVTITADTSTSTAYMELSSLRSEDTAVYYCAPFGYYVSDYAMAYWGQGTLVTVSS

SEQ ID NO: 514 - protein, 111 aa, Artificial Sequence
  CEA (T84.66-LCHA) VL
EIVLTQSPATLSLSPGERATLSCRAGESVDIFGVGFLHWYQQKPGQAPRLLIYRASNRATGIPARFSGSGSGTDFTLTISSLEPEDFAVYYCQQTNEDPYTFGQGTKLEIK

SEQ ID NO: 515 - protein, 5 aa, Artificial Sequence
  EpCAM (MT201)- CDR-H1
SYGMH

SEQ ID NO: 516 - protein, 17 aa, Artificial Sequence
  EpCAM (MT201)- CDR-H2
VISYDGSNKYYADSVKG

SEQ ID NO: 517 - protein, 16 aa, Artificial Sequence
  EpCAM (MT201)- CDR-H3
DMGWGSGWRPYYYYGM

SEQ ID NO: 518 - protein, 11 aa, Artificial Sequence
  EpCAM (MT201)- CDR-L1
RTSQSISSYLN

SEQ ID NO: 519 - protein, 7 aa, Artificial Sequence
  EpCAM (MT201)- CDR-L2
WASTRES

SEQ ID NO: 520 - protein, 9 aa, Artificial Sequence
  EpCAM (MT201)- CDR-L3
QQSYDIPYT

SEQ ID NO: 521 - protein, 127 aa, Artificial Sequence
  EpCAM (MT201) VH
EVQLLESGGGVVQPGRSLRLSCAASGFTFSSYGMHWVRQAPGKGLEWVAVISYDGSNKYYADSVKGRFTISRDNSKNTLYLQMNSLRAEDTAVYYCAKDMGWGSGWRPYYYYGMDVWGQGTTVTVSS

SEQ ID NO: 522 - protein, 107 aa, Artificial Sequence
  EpCAM (MT201) VL
ELQMTQSPSSLSASVGDRVTITCRTSQSISSYLNWYQQKPGQPPKLLIYWASTRESGVPDRFSGSGSGTDFTLTISSLQPEDSATYYCQQSYDIPYTFGQGTKLEIK

SEQ ID NO: 523 - protein, 5 aa, Artificial Sequence
  HER3- CDR-H1
SSYIS

SEQ ID NO: 524 - protein, 17 aa, Artificial Sequence
  HER3- CDR-H2
WIYAGTGSPSYNQKLQG

SEQ ID NO: 525 - protein, 9 aa, Artificial Sequence
  HER3- CDR-H3
HRDYYSNSL

SEQ ID NO: 526 - protein, 17 aa, Artificial Sequence
  HER3- CDR-L1
KSSQSVLNSGNQKNYLT

SEQ ID NO: 527 - protein, 7 aa, Artificial Sequence
  HER3- CDR-L2
WASTRES

SEQ ID NO: 528 - protein, 9 aa, Artificial Sequence
  HER3- CDR-L3
QSDYSYPYT

SEQ ID NO: 529 - protein, 120 aa, Artificial Sequence
  HER3 VH
QVQLVQSGAEVKKPGASVKVSCKASGYTFRSSYISWVRQAPGQGLEWMGWIYAGTGSPSYNQKLQGRVTMTTDTSTSTAYMELRSLRSDDTAVYYCARHRDYYSNSLTYWGQGTLVTVSS

SEQ ID NO: 530 - protein, 113 aa, Artificial Sequence
  HER3 VL
DIVMTQSPDSLAVSLGERATINCKSSQSVLNSGNQKNYLTWYQQKPGQPPKLLIYWASTRESGVPDRFSGSGSGTDFTLTISSLQAEDVAVYYCQSDYSYPYTFGQGTKLEIK

SEQ ID NO: 531 - protein, 5 aa, Artificial Sequence
  CD30- CDR-H1
DYYIT

SEQ ID NO: 532 - protein, 17 aa, Artificial Sequence
  CD30- CDR-H2
WIYPGSGNTKYNEKFKG

SEQ ID NO: 533 - protein, 6 aa, Artificial Sequence
  CD30- CDR-H3
YGNYWF

SEQ ID NO: 534 - protein, 15 aa, Artificial Sequence
  CD30- CDR-L1
KASQSVDFDGDSYMN

SEQ ID NO: 535 - protein, 7 aa, Artificial Sequence
  CD30- CDR-L2
AASTLQI

SEQ ID NO: 536 - protein, 9 aa, Artificial Sequence
  CD30- CDR-L3
QQSNEDPWT

SEQ ID NO: 537 - protein, 117 aa, Artificial Sequence
  CD30 VH
QIQLQQSGPEVVKPGASVKISCKASGYTFTDYYITWVKQKPGQGLEWIGWIYPGSGNTKYNEKFKGKATLTVDTSSSTAFMQLSSLTSEDTAVYFCANYGNYWFAYWGQGTQVTVSA

SEQ ID NO: 538 - protein, 111 aa, Artificial Sequence
  CD30 VL
DIVLTQSPASLAVSLGQRATISCKASQSVDFDGDSYMNWYQQKPGQPPKVLIYAASNLESGIPARFSGSGSGTDFTLNIHPVEEEDAATYYCQQSNEDPWTFGGGTKLEIK

SEQ ID NO: 539 - protein, 5 aa, Artificial Sequence
  TPBG(FAB091)- CDR-H1
SDAMH

SEQ ID NO: 540 - protein, 17 aa, Artificial Sequence
  TPBG(FAB091)- CDR-H2
GVSGSGGSPYYADSVKG

SEQ ID NO: 541 - protein, 15 aa, Artificial Sequence
  TPBG(FAB091)- CDR-H3
GGSIAGSYYYYPMDV

SEQ ID NO: 542 - protein, 11 aa, Artificial Sequence
  TPBG(FAB091)- CDR-L1
QASQDISNYLN

SEQ ID NO: 543 - protein, 7 aa, Artificial Sequence
  TPBG(FAB091)- CDR-L2
AASTLQI

SEQ ID NO: 544 - protein, 9 aa, Artificial Sequence
  TPBG(FAB091)- CDR-L3
QQANSFPLT

SEQ ID NO: 545 - protein, 124 aa, Artificial Sequence
  TPBG(FAB091) VH
EVHLLESGGGLVHPGGSLRLSCAASGFTFRSDAMHWVRQAPGKGLEWVSGVSGSGGSPYYADSVKGRFTISRDDSKTTLYLQMNSLRAEDTAVYYCATGGSIAGSYYYYPMDVWGQGTTVTVSS

SEQ ID NO: 546 - protein, 107 aa, Artificial Sequence
  TPBG(FAB091) VL
DIQMTQSPSSLSASVGDRVTITCQASQDISNYLNWYQQKPGKAPKLLIYAASTLQIGVPSRFSGSGSGTDFTFTISSLQPEDFATYYCQQANSFPLTFGGGTKVEIK

SEQ ID NO: 547 - protein, 5 aa, Artificial Sequence
  CD38- CDR-H1
SFAMS

SEQ ID NO: 548 - protein, 17 aa, Artificial Sequence
  CD38- CDR-H2
AISGSGGGTYYADSVKG

SEQ ID NO: 549 - protein, 13 aa, Artificial Sequence
  CD38- CDR-H3
DKILWFGEPVFDY

SEQ ID NO: 550 - protein, 11 aa, Artificial Sequence
  CD38- CDR-L1
RASQSVSSYLA

SEQ ID NO: 551 - protein, 7 aa, Artificial Sequence
  CD38- CDR-L2
DASNRAT

SEQ ID NO: 552 - protein, 9 aa, Artificial Sequence
  CD38- CDR-L3
QQRSNWPPT

SEQ ID NO: 553 - protein, 122 aa, Artificial Sequence [sequence omitted]

SEQ ID NO: 554 - protein, 107 aa, Artificial Sequence [sequence omitted]

SEQ ID NO: 555 - protein, 5 aa, Artificial Sequence
  BCMA - CDR-H1
SYAMN

SEQ ID NO: 556 - protein, 17 aa, Artificial Sequence
  BCMA - CDR-H2
AITASGGSTYYADSVKG

SEQ ID NO: 557 - protein, 6 aa, Artificial Sequence
  BCMA - CDR-H3
YWPMSL

SEQ ID NO: 558 - protein, 12 aa, Artificial Sequence
  BCMA - CDR-L1
RASQSVSAYYLA

SEQ ID NO: 559 - protein, 7 aa, Artificial Sequence
  BCMA - CDR-L2
DASIRAT

SEQ ID NO: 560 - protein, 9 aa, Artificial Sequence
  BCMA - CDR-L3
QQYERWPLT

SEQ ID NO: 561 - protein, 115 aa, Artificial Sequence
  BCMA VH
EVQLLESGGGLVQPGGSLRLSCAASGFTFSSYAMNWVRQAPGKGLEWVSAITASGGSTYYADSVKGRFTISRDNSKNTLYLQMNSLRAEDTAVYYCARYWPMSLWGQGTLVTVSS

SEQ ID NO: 562 - protein, 108 aa, Artificial Sequence
  BCMA VL
EIVLTQSPGTLSLSPGERATLSCRASQSVSAYYLAWYQQKPGQAPRLLMYDASIRATGIPDRFSGSGSGTDFTLTISRLEPEDFAVYYCQQYERWPLTFGQGTKVEIK

SEQ ID NO: 563 - protein, 5 aa, Artificial Sequence
  GPRC5D (5E11) - CDR-H1
KYAMA

SEQ ID NO: 564 - protein, 17 aa, Artificial Sequence
  GPRC5D (5E11) - CDR-H2
SISTGGVNTYYADSVKG

SEQ ID NO: 565 - protein, 8 aa, Artificial Sequence
  GPRC5D (5E11) - CDR-H3
HTGDYFDY

SEQ ID NO: 566 - protein, 15 aa, Artificial Sequence
  GPRC5D (5E11) - CDR-L1
RASQSVSISGINLMN

SEQ ID NO: 567 - protein, 7 aa, Artificial Sequence
  GPRC5D (5E11) - CDR-L2
HASILAS

SEQ ID NO: 568 - protein, 9 aa, Artificial Sequence
  GPRC5D (5E11) - CDR-L3
QQTRESPLT

SEQ ID NO: 569 - protein, 117 aa, Artificial Sequence
  GPRC5D (5E11) VH1c
EVQLLESGGGLVQPGGSLRLSCAASGFTFSKYAMAWVRQAPGKGLEWVASISTGGVNTYYADSVKGRFTISRDNSKNTLYLQMNSLRAEDTAVYYCATHTGDYFDYWGQGTMVTVSS

SEQ ID NO: 570 - protein, 111 aa, Artificial Sequence
  GPRC5D (5E11) VL2b
EIVLTQSPGTLSLSPGERATLSCRASQSVSISGINLMNWYQQKPGQQPKLLIYHASILASGIPDRFSGSGSGTDFTLTISRLEPEDFAVYYCQQTRESPLTFGQGTRLEIK

SEQ ID NO: 571 - protein, 117 aa, Artificial Sequence
  GPRC5D (5E11) VH1a
EVQLLESGGGLVQPGGSLRLSCAASGFTFSKYAMAWVRQAPGKGLEWVASISTGGVNTYYRDSVKARFTISRDNSKNTLYLQMNSLRAEDTAVYYCATHTGDYFDYWGQGTMVTVSS

SEQ ID NO: 572 - protein, 117 aa, Artificial Sequence
  GPRC5D (5E11) VH1b
ELQLLESGGGLVQPGGSLRLSCAASGFTFSKYAMAWVRQAPGKGLEWVASISTGGVNTYYRDSVKARFTISRDNAKNTLYLQMNSLRAEDTAVYYCATHTGDYFDYWGQGTMVTVSS

SEQ ID NO: 573 - protein, 117 aa, Artificial Sequence
  GPRC5D (5E11) VH1d
ELQLLESGGGLVQPGGSLRLSCAASGFTFSKYAMAWVRQAPGKGLEWVASISTGGVNTYYADSVKGRFTISRDNAKNTLYLQMNSLRAEDTAVYYCATHTGDYFDYWGQGTMVTVSS

SEQ ID NO: 574 - protein, 111 aa, Artificial Sequence
  GPRC5D (5E11) VL1a
DIVMTQSPDSLAVSLGERATINCRASQSVSISGINLMNWYQQKPGQQPKLLIYHASILASGVPDRFSGSGSGTDFTLTISSLQAEDVAVYYCQQTRESPLTFGQGTRLEIK

SEQ ID NO: 575 - protein, 111 aa, Artificial Sequence
  GPRC5D (5E11) VL1c
DIVMTQSPDSLAVSLGERATINCKSSQSVSISGINLMNWYQQKPGQQPKLLIYHASILASGVPDRFSGSGSGTDFTLTISSLQAEDVAVYYCQQTRESPLTFGQGTRLEIK

SEQ ID NO: 576 - protein, 111 aa, Artificial Sequence
  GPRC5D (5E11) VL2a
EIVLTQSPGTLSLSPGERATLSCRASQSVSISGINLMNWYQQKPGQQPRLLIYHASILASGIPDRFSGSGSGTDFTLTISRLEPEDFAVYYCQQTRESPLTFGQGTRLEIK

SEQ ID NO: 577 - protein, 111 aa, Artificial Sequence
  GPRC5D (5E11) VL3a
DIQMTQSPSSLSASVGDRVTITCRASQSVSISGINLMNWYQQKPGKQPKLLIYHASILASGVPSRFSGSGSGTDFTLTISSLQPEDFATYYCQQTRESPLTFGQGTRLEIK

SEQ ID NO: 578 - protein, 111 aa, Artificial Sequence
  GPRC5D (5E11) VL3b
DIQMTQSPSSLSASVGDRVTITCRASQSVSISGINLMNWYQQKPGQQPKLLIYHASILASGVPSRFSGSGSGTDFTLTISSLQPEDFATYYCQQTRESPLTFGQGTRLEIK

SEQ ID NO: 579 - protein, 5 aa, Artificial Sequence
  GPRC5D (5F11) - CDR-H1
NYGMA

SEQ ID NO: 580 - protein, 17 aa, Artificial Sequence
  GPRC5D (5F11) - CDR-H2
SISTGGGNTYYRDSVKG

SEQ ID NO: 581 - protein, 7 aa, Artificial Sequence
  GPRC5D (5F11) - CDR-H3
HDRGGLY

SEQ ID NO: 582 - protein, 16 aa, Artificial Sequence
  GPRC5D (5F11) - CDR-L1
RSSKSLLHSNGITYVY

SEQ ID NO: 583 - protein, 7 aa, Artificial Sequence
  GPRC5D (5F11) - CDR-L2
RMSNRAS

SEQ ID NO: 584 - protein, 9 aa, Artificial Sequence
  GPRC5D (5F11) - CDR-L3
GQLLENPYT

SEQ ID NO: 585 - protein, 116 aa, Artificial Sequence
  GPRC5D (5F11) VH1a
QVQLVESGGGVVQPGRSLRLSCAASGFSFSNYGMAWVRQAPGKGLEWVASISTGGGNTYYRDSVKGRFTISRDNSKNTLYLQMNSLRAEDTAVYYCTRHDRGGLYWGQGTMVTVSS

SEQ ID NO: 586 - protein, 116 aa, Artificial Sequence
  GPRC5D (5F11) VH1b
EVQLVESGGGVVQPGRSLRLSCAASGFSFSNYGMAWVRQAPGKGLEWVASISTGGGNTYYRDSVKGRFTISRDNAKNTLYLQMNSLRAEDTAVYYCTRHDRGGLYWGQGTMVTVSS

SEQ ID NO: 587 - protein, 116 aa, Artificial Sequence
  GPRC5D (5F11) VH1c
QVQLVESGGGVVQPGRSLRLSCAASGFSFSNYGMAWVRQAPGKGLEWVASISTGGGNTYYADSVKGRFTISRDNSKNTLYLQMNSLRAEDTAVYYCTRHDRGGLYWGQGTMVTVSS

SEQ ID NO: 588 - protein, 116 aa, Artificial Sequence
  GPRC5D (5F11) VH1d
EVQLVESGGGVVQPGRSLRLSCAASGFSFSNYGMAWVRQAPGKGLEWVASISTGGGNTYYADSVKGRFTISRDNAKNTLYLQMNSLRAEDTAVYYCTRHDRGGLYWGQGTMVTVSS

SEQ ID NO: 589 - protein, 116 aa, Artificial Sequence
  GPRC5D (5F11) VH2b
EVQLVESGGGLVQPGGSLRLSCAASGFSFSNYGMAWVRQAPGKGLEWVASISTGGGNTYYRDSVKGRFTISRDNAKNTLYLQMNSLRAEDTAVYYCTRHDRGGLYWGQGTMVTVSS

SEQ ID NO: 590 - protein, 116 aa, Artificial Sequence
  GPRC5D (5F11) VH2d
EVQLVESGGGLVQPGGSLRLSCAASGFSFSNYGMAWVRQAPGKGLEWVASISTGGGNTYYADSVKGRFTISRDNAKNTLYLQMNSLRAEDTAVYYCTRHDRGGLYWGQGTMVTVSS

SEQ ID NO: 591 - protein, 112 aa, Artificial Sequence
  GPRC5D (5F11) VL1a
DIVMTQSPLSLPVTPGEPASISCRSSKSLLHSNGITYVYWYLQKPGQSPQVLIYRMSNLASGVPDRFSGSGSGTDFTLKISRVEAEDVGVYHCGQLLENPYTFGQGTKLEIK

SEQ ID NO: 592 - protein, 112 aa, Artificial Sequence
  GPRC5D (5F11) VL1b
DIVMTQSPLSLPVTPGEPASISCRSSKSLLHSNGITYVYWYLQKPGKSPQVLIYRMSNLASGVPDRFSGSGSGTDFTLKISRVEAEDVGVYHCGQLLENPYTFGQGTKLEIK

SEQ ID NO: 593 - protein, 112 aa, Artificial Sequence
  GPRC5D (5F11) VL2a
DIVMTQSPLSLPVTPGEPASISCRSSKSLLHSNGITYVYWYLQKPGQSPQLLIYRMSNRASGVPDRFSGSGSGTDFTLKISRVEAEDVGVYHCGQLLENPYTFGQGTKLEIK

SEQ ID NO: 594 - protein, 112 aa, Artificial Sequence
  GPRC5D (5F11) VL2b
DIVMTQSPDSLAVSLGERATINCKSSKSLLHSNGITYVYWYQQKPGQPPKLLIYRMSNLASGVPDRFSGSGSGTDFTLTISSLQAEDVAVYHCGQLLENPYTFGQGTKLEIK

SEQ ID NO: 595 - protein, 112 aa, Artificial Sequence
  GPRC5D (5F11) VL2c
EIVLTQSPGTLSLSPGERATLSCRASKSLLHSNGITYVYWYQQKPGQAPRLLIYRMSNLASGIPDRFSGSGSGTDFTLTISRLEPEDFAVYHCGQLLENPYTFGQGTKLEIK

SEQ ID NO: 596 - protein, 5 aa, Artificial Sequence
  CD3 (Cl22) CDR-H1
SYAMN

SEQ ID NO: 597 - protein, 19 aa, Artificial Sequence
  CD3 (Cl22) CDR-H2
RIRSKYNNYATYYADSVKG

SEQ ID NO: 598 - protein, 14 aa, Artificial Sequence
  CD3 (Cl22) CDR-H3
HTTFPSSYVSYYGY

SEQ ID NO: 599 - protein, 14 aa, Artificial Sequence
  CD3 (Cl22) CDR-L1
GSSTGAVTTSNYAN

SEQ ID NO: 600 - protein, 7 aa, Artificial Sequence
  CD3 (Cl22) CDR-L2
GTNKRAP

SEQ ID NO: 601 - protein, 9 aa, Artificial Sequence
  CD3 (Cl22) CDR-L3
ALWYSNLWV

SEQ ID NO: 602 - protein, 125 aa, Artificial Sequence
  CD3 (Cl22) VH
EVQLLESGGGLVQPGGSLRLSCAASGFQFSSYAMNWVRQAPGKGLEWVSRIRSKYNNYATYYADSVKGRFTISRDDSKNTLYLQMNSLRAEDTAVYYCVRHTTFPSSYVSYYGYWGQGTLVTVSS

SEQ ID NO: 603 - protein, 109 aa, Artificial Sequence; identical to SEQ ID NO: 446
  CD3 (Cl22) VL

SEQ ID NO: 604 - protein, 10 aa, Artificial Sequence
  CD3 (V9) CDR-H1
GYSFTGYTMN

SEQ ID NO: 605 - protein, 17 aa, Artificial Sequence
  CD3 (V9) CDR-H2
LINPYKGVSTYNQKFKD

SEQ ID NO: 606 - protein, 13 aa, Artificial Sequence
  CD3 (V9) CDR-H3
SGYYGDSDWYFDV

SEQ ID NO: 607 - protein, 11 aa, Artificial Sequence
  CD3 (V9) CDR-L1
RASQDIRNYLN

SEQ ID NO: 608 - protein, 7 aa, Artificial Sequence
  CD3 (V9) CDR-L2
YTSRLES

SEQ ID NO: 609 - protein, 9 aa, Artificial Sequence
  CD3 (V9) CDR-L3
QQGNTLPWT

SEQ ID NO: 610 - protein, 122 aa, Artificial Sequence [sequence omitted]

SEQ ID NO: 611 - protein, 107 aa, Artificial Sequence [sequence omitted]

1. A bispecific agonistic CD28 antigen binding molecule characterized by monovalent binding to CD28, comprising
(a) one antigen binding domain capable of specific binding to CD28,
(b) at least one antigen binding domain capable of specific binding to a tumor-associated antigen, and
(c) a Fc domain composed of a first and a second subunit capable of stable association comprising one or more amino acid substitution that reduces the binding affinity of the antigen binding molecule to an Fc receptor and/or effector function.

2. The bispecific agonistic CD28 antigen binding molecule of claim 1, wherein the Fc domain is of human IgG1 subclass and comprises the amino acid mutations L234A, L235A and P329G (numbering according to Kabat EU index).

3. The bispecific agonistic CD28 antigen binding molecule of claim 1 or 2, wherein the antigen binding domain capable of specific binding to CD28 comprises
(i) a heavy chain variable region (V_{H}CD28) comprising a heavy chain complementary determining region CDR-H1 of SEQ ID NO: 36, a CDR-H2 of SEQ ID NO: 37, and a CDR-H3 of SEQ ID NO: 38, and a light chain variable region (V_{L}CD28) comprising a light chain complementary determining region CDR-L1 of SEQ ID NO: 39, a CDR-L2 of SEQ ID NO: 40 and a CDR-L3 of SEQ ID NO: 41; or
(ii) a heavy chain variable region (V_{H}CD28) comprising a CDR-H1 of SEQ ID NO: 20, a CDR-H2 of SEQ ID NO: 21, and a CDR-H3 of SEQ ID NO: 22, and a light chain variable region (V_{L}CD28) comprising a CDR-L1 of SEQ ID NO: 23, a CDR-L2 of SEQ ID NO: 24 and a CDR-L3 of SEQ ID NO: 25.

4. The bispecific agonistic CD28 antigen binding molecule of any one of claims 1 to 3, wherein the antigen binding domain capable of specific binding to CD28 comprises a heavy chain variable region (V_{H}CD28) comprising an amino acid sequence that is at least about 95%, 96%, 97%, 98%, 99% or 100% identical to the amino acid sequence of SEQ ID NO:26, and a light chain variable region (V_{L}CD28) comprising an amino acid sequence that is at least about 95%, 96%, 97%, 98%, 99% or 100% identical to the amino acid sequence of SEQ ID NO:27.

5. The bispecific agonistic CD28 antigen binding molecule of any one of claims 1 to 4, wherein the antigen binding domain capable of specific binding to CD28 comprises a heavy chain variable region (V_{H}CD28) comprising an amino acid sequence selected from the group consisting of SEQ ID NO:42, SEQ ID NO:43, SEQ ID NO:44, SEQ ID NO:45, SEQ ID NO:46, SEQ ID NO:47, SEQ ID NO:48, SEQ ID NO:49, SEQ ID NO:50 and SEQ ID NO:51, and a light chain variable region (V_{L}CD28) comprising an amino acid sequence selected from the group consisting of SEQ ID NO:27, SEQ ID NO:52, SEQ ID NO:53, SEQ ID NO:54, SEQ ID NO:55, SEQ ID NO:56, SEQ ID NO:57, SEQ ID NO:58, SEQ ID NO:59, SEQ ID NO:60 and SEQ ID NO:61.

6. The bispecific agonistic CD28 antigen binding molecule of any one of claims 1 to 3 or 5, wherein the antigen binding domain capable of specific binding to CD28 comprises
(a) a heavy chain variable region (V_{H}CD28) comprising the amino acid sequence of SEQ ID NO:47 and a light chain variable region (V_{L}CD28) comprising the amino acid sequence of SEQ ID NO:54, or
(b) a heavy chain variable region (V_{H}CD28) comprising the amino acid sequence of SEQ ID NO:47 and a light chain variable region (V_{L}CD28) comprising the amino acid sequence of SEQ ID NO:27, or
(c) a heavy chain variable region (V_{H}CD28) comprising the amino acid sequence of SEQ ID NO:51 and a light chain variable region (V_{L}CD28) comprising the amino acid sequence of SEQ ID NO:61, or
(d) a heavy chain variable region (V_{H}CD28) comprising the amino acid sequence of SEQ ID NO:46 and a light chain variable region (V_{L}CD28) comprising the amino acid sequence of SEQ ID NO:53, or
(e) a heavy chain variable region (V_{H}CD28) comprising the amino acid sequence of SEQ ID NO:46 and a light chain variable region (V_{L}CD28) comprising the amino acid sequence of SEQ ID NO:54, or
(f) a heavy chain variable region (V_{H}CD28) comprising the amino acid sequence of SEQ ID NO:46 and a light chain variable region (V_{L}CD28) comprising the amino acid sequence of SEQ ID NO:59, or
(g) a heavy chain variable region (V_{H}CD28) comprising the amino acid sequence of SEQ ID NO:46 and a light chain variable region (V_{L}CD28) comprising the amino acid sequence of SEQ ID NO:27, or
(h) a heavy chain variable region (V_{H}CD28) comprising the amino acid sequence of SEQ ID NO:43 and a light chain variable region (V_{L}CD28) comprising the amino acid sequence of SEQ ID NO:27, or
(i) a heavy chain variable region (V_{H}CD28) comprising the amino acid sequence of SEQ ID NO:42 and a light chain variable region (V_{L}CD28) comprising the amino acid sequence of SEQ ID NO:53, or
(j) a heavy chain variable region (V_{H}CD28) comprising the amino acid sequence of SEQ ID NO:42 and a light chain variable region (V_{L}CD28) comprising the amino acid sequence of SEQ ID NO:59, or
(k) a heavy chain variable region (V_{H}CD28) comprising the amino acid sequence of SEQ ID NO:42 and a light chain variable region (V_{L}CD28) comprising the amino acid sequence of SEQ ID NO:27.

7. The bispecific agonistic CD28 antigen binding molecule of any one of claims 1 to 6, wherein the antigen binding domain capable of specific binding to a tumor-associated antigen is selected from the group consisting of Fibroblast Activation Protein (FAP), Carcinoembryonic Antigen (CEA), Folate receptor alpha (FolR1), Melanoma-associated Chondroitin Sulfate Proteoglycan (MCSP), Epidermal Growth Factor Receptor (EGFR), human epidermal growth factor receptor 2 (HER2), p95HER2, epithelial cell adhesion molecule (EpCAM), HER3, CD30, TPBG (5T4), CD19, CD79b, CD20, CD22, CD37, CD38, BCMA and GPRC5D.

8. The bispecific agonistic CD28 antigen binding molecule of any one of claims 1 to 7, wherein the antigen binding domain capable of specific binding to a tumor-associated antigen is an antigen binding domain capable of specific binding to Carcinoembryonic Antigen (CEA).

9. The bispecific agonistic CD28 antigen binding molecule of any one of claims 1 to 8, wherein the antigen binding domain capable of specific binding to CEA comprises
(i) a heavy chain variable region (V_{H}CEA) comprising a CDR-H1 comprising the amino acid sequence of SEQ ID NO: 188, a CDR-H2 comprising the amino acid sequence of SEQ ID NO: 189, and a CDR-H3 comprising the amino acid sequence of SEQ ID NO: 190, and a light chain variable region (V_{L}CEA) comprising a CDR-L1 comprising the amino acid sequence of SEQ ID NO:191, a CDR-L2 comprising the amino acid sequence of SEQ ID NO: 192, and a CDR-L3 comprising the amino acid sequence of SEQ ID NO: 193; or
(ii) a heavy chain variable region (V_{H}CEA) comprising a CDR-H1 comprising the amino acid sequence of SEQ ID NO: 180, a CDR-H2 comprising the amino acid sequence of SEQ ID NO: 181, and a CDR-H3 comprising the amino acid sequence of SEQ ID NO: 182, and a light chain variable region (V_{L}CEA) comprising a CDR-L1 comprising the amino acid sequence of SEQ ID NO: 183, a CDR-L2 comprising the amino acid sequence of SEQ ID NO: 184, and a CDR-L3 comprising the amino acid sequence of SEQ ID NO: 185; or
(iii) a heavy chain variable region (V_{H}CEA) comprising a CDR-H1 comprising the amino acid sequence of SEQ ID NO: 127, a CDR-H2 comprising the amino acid sequence of SEQ ID NO: 128, and a CDR-H3 comprising the amino acid sequence of SEQ ID NO: 129, and a light chain variable region (V_{L}CEA) comprising a CDR-L1 comprising the amino acid sequence of SEQ ID NO: 130, a CDR-L2 comprising the amino acid sequence of SEQ ID NO: 131, and a CDR-L3 comprising the amino acid sequence of SEQ ID NO: 132,
(iv) a heavy chain variable region (V_{H}CEA) comprising a CDR-H1 comprising the amino acid sequence of SEQ ID NO:507, a CDR-H2 comprising the amino acid sequence of SEQ ID NO:508, and a CDR-H3 comprising the amino acid sequence of SEQ ID NO:509, and a light chain variable region (V_{L}CEA) comprising a CDR-L1 comprising the amino acid sequence of SEQ ID NO:510, a CDR-L2 comprising the amino acid sequence of SEQ ID NO:511, and a CDR-L3 comprising the amino acid sequence of SEQ ID NO:512.

10. The bispecific agonistic CD28 antigen binding molecule of any one of claims 1 to 9, wherein the antigen binding domain capable of specific binding to CEA comprises a heavy chain variable region (V_{H}CEA) comprising the amino acid sequence of SEQ ID NO: 186, and a light chain variable region (V_{L}CEA) comprising the amino acid sequence of SEQ ID NO: 187.

11. The bispecific agonistic CD28 antigen binding molecule of any one of claims 1 to 9, wherein the antigen binding domain capable of specific binding to CEA comprises
(a) a heavy chain variable region (V_{H}CEA) comprising the amino acid sequence of SEQ ID NO: 194 and a light chain variable region (V_{L}CEA) comprising the amino acid sequence of SEQ ID NO: 195, or
(b) a heavy chain variable region (V_{H}CEA) comprising the amino acid sequence of SEQ ID NO: 196 and a light chain variable region (V_{L}CEA) comprising the amino acid sequence of SEQ ID NO:197, or
(c) a heavy chain variable region (V_{H}CEA) comprising the amino acid sequence of SEQ ID NO: 198 and a light chain variable region (V_{L}CEA) comprising the amino acid sequence of SEQ ID NO: 199, or
(d) a heavy chain variable region (V_{H}CEA) comprising the amino acid sequence of SEQ ID NO:200 and a light chain variable region (V_{L}CEA) comprising the amino acid sequence of SEQ ID NO:201, or
(e) a heavy chain variable region (V_{H}CEA) comprising the amino acid sequence of SEQ ID NO:202 and a light chain variable region (V_{L}CEA) comprising the amino acid sequence of SEQ ID NO:203, or
(f) a heavy chain variable region (V_{H}CEA) comprising the amino acid sequence of SEQ ID NO:204 and a light chain variable region (V_{L}CEA) comprising the amino acid sequence of SEQ ID NO:205, or
(g) a heavy chain variable region (V_{H}CEA) comprising the amino acid sequence of SEQ ID NO:206 and a light chain variable region (V_{L}CEA) comprising the amino acid sequence of SEQ ID NO:207, or
(h) a heavy chain variable region (V_{H}CEA) comprising the amino acid sequence of SEQ ID NO:208 and a light chain variable region (V_{L}CEA) comprising the amino acid sequence of SEQ ID NO:209, or
(i) a heavy chain variable region (V_{H}CEA) comprising the amino acid sequence of SEQ ID NO:210 and a light chain variable region (V_{L}CEA) comprising the amino acid sequence of SEQ ID NO:211, or
(j) a heavy chain variable region (V_{H}CEA) comprising the amino acid sequence of SEQ ID NO:212 and a light chain variable region (V_{L}CEA) comprising the amino acid sequence of SEQ ID NO:213.

12. The bispecific agonistic CD28 antigen binding molecule of any one of claims 1 to 9 or 11, wherein the antigen binding domain capable of specific binding to CEA comprises a heavy chain variable region (V_{H}CEA) comprising the amino acid sequence of SEQ ID NO:200 and a light chain variable region (V_{L}CEA) comprising the amino acid sequence of SEQ ID NO:201.

13. The bispecific agonistic CD28 antigen binding molecule of any one of claims 1 to 7, wherein the antigen binding domain capable of specific binding to a tumor-associated antigen is an antigen binding domain capable of specific binding to Fibroblast Activation Protein (FAP).

14. The bispecific agonistic CD28 antigen binding molecule of any one of claims 1 to 7 or 13, wherein the antigen binding domain capable of specific binding to FAP comprises
(a) a heavy chain variable region (V_{H}FAP) comprising (i) CDR-H1 comprising the amino acid sequence of SEQ ID NO: 12, (ii) CDR-H2 comprising the amino acid sequence of SEQ ID NO: 13, and (iii) CDR-H3 comprising the amino acid sequence of SEQ ID NO: 14, and a light chain variable region (V_{L}FAP) comprising (iv) CDR-L1 comprising the amino acid sequence of SEQ ID NO: 15, (v) CDR-L2 comprising the amino acid sequence of SEQ ID NO: 16, and (vi) CDR-L3 comprising the amino acid sequence of SEQ ID NO: 17, or
(b) a heavy chain variable region (V_{H}FAP) comprising (i) CDR-H1 comprising the amino acid sequence of SEQ ID NO:4, (ii) CDR-H2 comprising the amino acid sequence of SEQ ID NO:5, and (iii) CDR-H3 comprising the amino acid sequence of SEQ ID NO:6, and a light chain variable region (V_{L}FAP) comprising (iv) CDR-L1 comprising the amino acid sequence of SEQ ID NO:7, (v) CDR-L2 comprising the amino acid sequence of SEQ ID NO:8, and (vi) CDR-L3 comprising the amino acid sequence of SEQ ID NO:9.

15. The bispecific agonistic CD28 antigen binding molecule of any one of claims 1 to 7 or 13 or 14, wherein the antigen binding domain capable of specific binding to FAP comprises a heavy chain variable region (V_{H}FAP) comprising the amino acid sequence of SEQ ID NO: 18 and a light chain variable region (V_{L}FAP) comprising the amino acid sequence of SEQ ID NO:19.

16. The bispecific agonistic CD28 antigen binding molecule of any one of claims 1 to 7, wherein the antigen binding domain capable of specific binding to a tumor-associated antigen is an antigen binding domain capable of specific binding to epithelial cell adhesion molecule (EpCAM).

17. The bispecific agonistic CD28 antigen binding molecule of any one of claims 1 to 7 or 16, wherein the antigen binding domain capable of specific binding to EpCAM comprises comprises a heavy chain variable region (V_{H}EpCAM) comprising (i) CDR-H1 comprising the amino acid sequence of SEQ ID NO:515, (ii) CDR-H2 comprising the amino acid sequence of SEQ ID NO:516, and (iii) CDR-H3 comprising the amino acid sequence of SEQ ID NO:517, and a light chain variable region (V_{L}EpCAM) comprising (iv) CDR-L1 comprising the amino acid sequence of SEQ ID NO:518, (v) CDR-L2 comprising the amino acid sequence of SEQ ID NO:519, and (vi) CDR-L3 comprising the amino acid sequence of SEQ ID NO:520.

18. The bispecific agonistic CD28 antigen binding molecule of any one of claims 1 to 7 or 16 or 17, wherein the antigen binding domain capable of specific binding to EpCAM comprises a heavy chain variable region (V_{H}EpCAM) comprising the amino acid sequence of SEQ ID NO:521 and a light chain variable region (V_{L}EpCAM) comprising the amino acid sequence of SEQ ID NO:522.

19. The bispecific agonistic CD28 antigen binding molecule of any one of claims 1 to 7, wherein the antigen binding domain capable of specific binding to a tumor-associated antigen is an antigen binding domain capable of specific binding to HER3.

20. The bispecific agonistic CD28 antigen binding molecule of any one of claims 1 to 7 or 19, wherein the antigen binding domain capable of specific binding to HER3 comprises a heavy chain variable region (V_{H}HER3) comprising (i) CDR-H1 comprising the amino acid sequence of SEQ ID NO:523, (ii) CDR-H2 comprising the amino acid sequence of SEQ ID NO:524, and (iii) CDR-H3 comprising the amino acid sequence of SEQ ID NO:525, and a light chain variable region (V_{L}HER3) comprising (iv) CDR-L1 comprising the amino acid sequence of SEQ ID NO:526, (v) CDR-L2 comprising the amino acid sequence of SEQ ID NO:527, and (vi) CDR-L3 comprising the amino acid sequence of SEQ ID NO:528.

21. The bispecific agonistic CD28 antigen binding molecule of any one of claims 1 to 7 or 19 or 20, wherein the antigen binding domain capable of specific binding to HER3 comprises a heavy chain variable region (V_{H}HER3) comprising the amino acid sequence of SEQ ID NO:529 and a light chain variable region (V_{L}HER3) comprising the amino acid sequence of SEQ ID NO:530.

22. The bispecific agonistic CD28 antigen binding molecule of any one of claims 1 to 7, wherein the antigen binding domain capable of specific binding to a tumor-associated antigen is an antigen binding domain capable of specific binding to CD30.

23. The bispecific agonistic CD28 antigen binding molecule of any one of claims 1 to 7 or 22, wherein the antigen binding domain capable of specific binding to CD30 comprises a heavy chain variable region (V_{H}CD30) comprising (i) CDR-H1 comprising the amino acid sequence of SEQ ID NO:531, (ii) CDR-H2 comprising the amino acid sequence of SEQ ID NO:532, and (iii) CDR-H3 comprising the amino acid sequence of SEQ ID NO:533, and a light chain variable region (V_{L}CD30) comprising (iv) CDR-L1 comprising the amino acid sequence of SEQ ID NO:534, (v) CDR-L2 comprising the amino acid sequence of SEQ ID NO:535, and (vi) CDR-L3 comprising the amino acid sequence of SEQ ID NO:536.

24. The bispecific agonistic CD28 antigen binding molecule of any one of claims 1 to 7 or 22 or 23, wherein the antigen binding domain capable of specific binding to CD30 comprises a heavy chain variable region (V_{H}CD30) comprising the amino acid sequence of SEQ ID NO:537 and a light chain variable region (V_{L}CD30) comprising the amino acid sequence of SEQ ID NO:538.

25. The bispecific agonistic CD28 antigen binding molecule of any one of claims 1 to 7, wherein the antigen binding domain capable of specific binding to a tumor-associated antigen is an antigen binding domain capable of specific binding to TBPG.

26. The bispecific agonistic CD28 antigen binding molecule of any one of claims 1 to 7 or 25, wherein the antigen binding domain capable of specific binding to TBPG comprises a heavy chain variable region (V_{H}TBPG) comprising (i) CDR-H1 comprising the amino acid sequence of SEQ ID NO:539, (ii) CDR-H2 comprising the amino acid sequence of SEQ ID NO:540, and (iii) CDR-H3 comprising the amino acid sequence of SEQ ID NO:541, and a light chain variable region (V_{L}TBPG) comprising (iv) CDR-L1 comprising the amino acid sequence of SEQ ID NO:542, (v) CDR-L2 comprising the amino acid sequence of SEQ ID NO:543, and (vi) CDR-L3 comprising the amino acid sequence of SEQ ID NO:544.

27. The bispecific agonistic CD28 antigen binding molecule of any one of claims 1 to 7 or 25 or 26, wherein the antigen binding domain capable of specific binding to TBPG comprises a heavy chain variable region (V_{H}TBPG) comprising the amino acid sequence of SEQ ID NO:545 and a light chain variable region (V_{L}TBPG) comprising the amino acid sequence of SEQ ID NO:546.

28. The bispecific agonistic CD28 antigen binding molecule of any one of claims 1 to 7, wherein the antigen binding domain capable of specific binding to a tumor-associated antigen is a Multiple Myeloma (MM) cell surface antigen selected from the group consisting of CD38, BCMA and GPRC5D.

29. The bispecific agonistic CD28 antigen binding molecule of any one of claims 1 to 7 or 28, wherein the antigen binding domain capable of specific binding to a tumor-associated antigen is an antigen binding domain capable of specific binding to GPRC5D.

30. The bispecific agonistic CD28 antigen binding molecule of any one of claims 1 to 7 or 28 or 29, wherein the antigen binding domain capable of specific binding to GPRC5D comprises
(a) a heavy chain variable region (V_{H}GPRC5D) comprising (i) CDR-H1 comprising the amino acid sequence of SEQ ID NO:563, (ii) CDR-H2 comprising the amino acid sequence of SEQ ID NO:564, and (iii) CDR-H3 comprising the amino acid sequence of SEQ ID NO:565, and a light chain variable region (V_{L}GPRC5D) comprising (iv) CDR-L1 comprising the amino acid sequence of SEQ ID NO:566, (v) CDR-L2 comprising the amino acid sequence of SEQ ID NO:567, and (vi) CDR-L3 comprising the amino acid sequence of SEQ ID NO:568, or
(b) a heavy chain variable region (V_{H}GPRC5D) comprising (i) CDR-H1 comprising the amino acid sequence of SEQ ID NO:579, (ii) CDR-H2 comprising the amino acid sequence of SEQ ID NO:580, and (iii) CDR-H3 comprising the amino acid sequence of SEQ ID NO:581, and a light chain variable region (V_{L}GPRC5D) comprising (iv) CDR-L1 comprising the amino acid sequence of SEQ ID NO:582, (v) CDR-L2 comprising the amino acid sequence of SEQ ID NO:583, and (vi) CDR-L3 comprising the amino acid sequence of SEQ ID NO:584.

31. The bispecific agonistic CD28 antigen binding molecule of any one of claims 1 to 7 or 28 to 30, wherein the antigen binding domain capable of specific binding to GPRC5D comprises a heavy chain variable region (V_{H}GPRC5D) comprising the amino acid sequence of SEQ ID NO:569 and a light chain variable region (V_{L}GPRC5D) comprising the amino acid sequence of SEQ ID NO:570.

32. The bispecific agonistic CD28 antigen binding molecule of any one of claims 1 to 7 or 28, wherein the antigen binding domain capable of specific binding to a tumor-associated antigen is an antigen binding domain capable of specific binding to CD38.

33. The bispecific agonistic CD28 antigen binding molecule of any one of claims 1 to 7 or 28 or 32, wherein the antigen binding domain capable of specific binding to CD38 comprises a heavy chain variable region (V_{H}CD38) comprising (i) CDR-H1 comprising the amino acid sequence of SEQ ID NO:547, (ii) CDR-H2 comprising the amino acid sequence of SEQ ID NO:548, and (iii) CDR-H3 comprising the amino acid sequence of SEQ ID NO:549, and a light chain variable region (V_{L}CD38) comprising (iv) CDR-L1 comprising the amino acid sequence of SEQ ID NO:550, (v) CDR-L2 comprising the amino acid sequence of SEQ ID NO:551, and (vi) CDR-L3 comprising the amino acid sequence of SEQ ID NO:552.

34. The bispecific agonistic CD28 antigen binding molecule of any one of claims 1 to 7 or 28 or 32 or 33, wherein the antigen binding domain capable of specific binding to CD38 comprises a heavy chain variable region (V_{H}CD38) comprising the amino acid sequence of SEQ ID NO:553 and a light chain variable region (V_{L}CD38) comprising the amino acid sequence of SEQ ID NO:554.

35. The bispecific agonistic CD28 antigen binding molecule of any one of claims 1 to 7 or 28, wherein the antigen binding domain capable of specific binding to a tumor-associated antigen is an antigen binding domain capable of specific binding to BCMA.

36. The bispecific agonistic CD28 antigen binding molecule of any one of claims 1 to 7 or 28 or 35, wherein the antigen binding domain capable of specific binding to BCMA comprises a heavy chain variable region (VHBCMA) comprising (i) CDR-H1 comprising the amino acid sequence of SEQ ID NO:555, (ii) CDR-H2 comprising the amino acid sequence of SEQ ID NO:556, and (iii) CDR-H3 comprising the amino acid sequence of SEQ ID NO:557, and a light chain variable region (V_{L}BCMA) comprising (iv) CDR-L1 comprising the amino acid sequence of SEQ ID NO:558, (v) CDR-L2 comprising the amino acid sequence of SEQ ID NO:559, and (vi) CDR-L3 comprising the amino acid sequence of SEQ ID NO:560.

37. The bispecific agonistic CD28 antigen binding molecule of any one of claims 1 to 7 or 28 or 35 or 36, wherein the antigen binding domain capable of specific binding to BCMA comprises a heavy chain variable region (VHBCMA) comprising the amino acid sequence of SEQ ID NO:561 and a light chain variable region (V_{L}BCMA) comprising the amino acid sequence of SEQ ID NO:562.

38. The bispecific agonistic CD28 antigen binding molecule of any one of claims 1 to 7, wherein the antigen binding domain capable of specific binding to a tumor-associated antigen is a B cell surface antigen selected from the group consisting of CD19, CD79b, CD20, CD22 and CD37.

39. The bispecific agonistic CD28 antigen binding molecule of any one of claims 1 to 7 or 38, wherein the antigen binding domain capable of specific binding to a tumor-associated antigen is an antigen binding domain capable of specific binding to CD19.

40. The bispecific agonistic CD28 antigen binding molecule of any one of claims 1 to 7 or 38 or 39, wherein the antigen binding domain capable of specific binding to CD19 comprises
(a) a heavy chain variable region (V_{H}CD19) comprising (i) CDR-H1 comprising the amino acid sequence of SEQ ID NO:406, (ii) CDR-H2 comprising the amino acid sequence of SEQ ID NO:407, and (iii) CDR-H3 comprising the amino acid sequence of SEQ ID NO:408, and a light chain variable region (V_{L}CD19) comprising (iv) CDR-L1 comprising the amino acid sequence of SEQ ID NO:409, (v) CDR-L2 comprising the amino acid sequence of SEQ ID NO:410, and (vi) CDR-L3 comprising the amino acid sequence of SEQ ID NO:411, or
(b) a heavy chain variable region (V_{H}CD19) comprising (i) CDR-H1 comprising the amino acid sequence of SEQ ID NO:414, (ii) CDR-H2 comprising the amino acid sequence of SEQ ID NO:415, and (iii) CDR-H3 comprising the amino acid sequence of SEQ ID NO:416, and a light chain variable region (V_{L}CD19) comprising (iv) CDR-L1 comprising the amino acid sequence of SEQ ID NO:417, (v) CDR-L2 comprising the amino acid sequence of SEQ ID NO:418, and (vi) CDR-L3 comprising the amino acid sequence of SEQ ID NO:419.

41. The bispecific agonistic CD28 antigen binding molecule of any one of claims 1 to 7 or 38 or 39 or 40, wherein the antigen binding domain capable of specific binding to CD19 comprises (a) a heavy chain variable region (V_{H}CD19) comprising an amino acid sequence that is at least about 95%, 98% or 100% identical to the amino acid sequence of SEQ ID NO:412, and a light chain variable region (V_{L}CD19) comprising an amino acid sequence that is at least about 95%, 98% or 100% identical to the amino acid sequence of SEQ ID NO:413, or (b) a heavy chain variable region (V_{H}CD19) comprising an amino acid sequence that is at least about 95%, 98% or 100% identical to the amino acid sequence of SEQ ID NO:420, and a light chain variable region (V_{L}CD19) comprising an amino acid sequence that is at least about 95%, 98% or 100% identical to the amino acid sequence of SEQ ID NO:421.

42. The bispecific agonistic CD28 antigen binding molecule of any one of claims 1 to 7 or 38 to 41, wherein the antigen binding domain capable of specific binding to CD19 comprises a heavy chain variable region (V_{H}CD19) comprising an amino acid sequence of SEQ ID NO:412 and a light chain variable region (V_{L}CD19) comprising an amino acid sequence of SEQ ID NO:413.

43. The bispecific agonistic CD28 antigen binding molecule of any one of claims 1 to 7 or 38, wherein the antigen binding domain capable of specific binding to a tumor-associated antigen is an antigen binding domain capable of specific binding to CD79b.

44. The bispecific agonistic CD28 antigen binding molecule of any one of claims 1 to 7 or 38 or 43, wherein the antigen binding domain capable of specific binding to CD79b comprises a heavy chain variable region (V_{H}CD79b) comprising (i) CDR-H1 comprising the amino acid sequence of SEQ ID NO:422, (ii) CDR-H2 comprising the amino acid sequence of SEQ ID NO:423, and (iii) CDR-H3 comprising the amino acid sequence of SEQ ID NO:424, and a light chain variable region (V_{L}CD79b) comprising (iv) CDR-L1 comprising the amino acid sequence of SEQ ID NO:425, (v) CDR-L2 comprising the amino acid sequence of SEQ ID NO:426, and (vi) CDR-L3 comprising the amino acid sequence of SEQ ID NO:427.

45. The bispecific agonistic CD28 antigen binding molecule of any one of claims 1 to 7 or 38 or 43 or 44, wherein the antigen binding domain capable of binding to CD79b comprises a heavy chain variable region (V_{H}CD79b) comprising the amino acid sequence of SEQ ID NO:428, and a light chain variable region (V_{L}CD79b) comprising the amino acid sequence of SEQ ID NO:429.

46. The bispecific agonistic CD28 antigen binding molecule of any one of claims 1 to 45, comprising
(a) one Fab fragment capable of specific binding to CD28,
(b) one crossFab fragment capable of specific binding to a tumor-associated antigen, and
(c) a Fc domain composed of a first and a second subunit capable of stable association comprising one or more amino acid substitution that reduces the binding affinity of the antigen binding molecule to an Fc receptor and/or effector function.

47. The bispecific agonistic CD28 antigen binding molecule of any one of claims 1 to 45, comprising
(a) a first Fab fragment capable of specific binding to CD28,
(b) a second Fab fragment capable of specific binding to a tumor-associated antigen, and
(c) a Fc domain composed of a first and a second subunit capable of stable association comprising one or more amino acid substitution that reduces the binding affinity of the antigen binding molecule to an Fc receptor and/or effector function,
wherein the first Fab fragment capable of specific binding to CD28 is fused at the C-terminus of the Fab heavy chain to the N-terminus of the Fab heavy chain of the second Fab fragment capable of specific binding to a tumor-associated antigen, which is in turn fused at its C-terminus to the N-terminus of one of the Fc domain subunits.

48. The bispecific agonistic CD28 antigen binding molecule of any one of claims 1 to 45, comprising
(a) a first Fab fragment capable of specific binding to CD28,
(b) a second and a third Fab fragment capable of specific binding to a tumor-associated antigen, and
(c) a Fc domain composed of a first and a second subunit capable of stable association comprising one or more amino acid substitution that reduces the binding affinity of the antigen binding molecule to an Fc receptor and/or effector function,
wherein the first Fab fragment capable of specific binding to CD28 is fused at the C-terminus of the Fab heavy chain to the N-terminus of the Fab heavy chain of the second Fab fragment capable of specific binding to a tumor-associated antigen, which is in turn fused at its C-terminus to the N-terminus of the first Fc domain subunit, and the third Fab fragment capable of specific binding to a tumor-associated antigen is fused at the C-terminus of the Fab heavy chain to the N-terminus of the second Fc domain subunit.

49. One or more isolated polynucleotide encoding the bispecific agonistic CD28 antigen binding molecule of any one of claims 1 to 48.

50. One or more vector, particularly expression vector, comprising the polynucleotide(s) of claim 49.

51. A host cell comprising the polynucleotide(s) of claim 49 or the vector(s) of claim 50.

52. A method of producing a bispecific agonistic CD28 antigen binding molecule, comprising the steps of a) culturing the host cell of claim 51 under conditions suitable for the expression of the bispecific agonistic CD28 antigen binding molecule and b) optionally recovering the bispecific agonistic CD28 antigen binding molecule.

53. A bispecific agonistic CD28 antigen binding molecule, produced by the method of claim 52.

54. A pharmaceutical composition comprising the bispecific agonistic CD28 antigen binding molecule of any one of claims 1 to 48 and at least one pharmaceutically acceptable excipient.

55. The pharmaceutical composition of claim 54 for use in the treatment of cancer.

56. The bispecific agonistic CD28 antigen binding molecule of any one of claims 1 to 48, or the pharmaceutical composition of claim 54, for use as a medicament.

57. The bispecific agonistic CD28 antigen binding molecule of any one of claims 1 to 48 for use in enhancing (a) T cell activation or (b) T cell effector functions.

58. The bispecific agonistic CD28 antigen binding molecule of any one of claims 1 to 48 for use in the treatment of cancer.

59. The bispecific agonistic CD28 antigen binding molecule of any one of claims 1 to 48 for use in the treatment of cancer, wherein the agonistic CD28 antigen binding molecule is for administration in combination with a chemotherapeutic agent, radiation therapy and/or other agents for use in cancer immunotherapy.

60. The bispecific agonistic CD28 antigen binding molecule of any one of claims 1 to 48 for use in the treatment of cancer, wherein the agonistic CD28 antigen binding molecule is for administration in combination with a T-cell activating anti-CD3 bispecific antibody.

61. The bispecific agonistic CD28 antigen binding molecule of any one of claims 1 to 48 for use in the treatment of cancer, wherein the agonistic CD28 antigen binding molecule is for administration in combination with an anti-PD-L1 antibody or an anti-PD-1 antibody.

62. Use of the bispecific agonistic CD28 antigen binding molecule of any one of claims 1 to 48, or the pharmaceutical composition of claim 54, in the manufacture of a medicament for the treatment of cancer.

63. A method of inhibiting the growth of tumor cells in an individual comprising administering to the individual an effective amount of the bispecific agonistic CD28 antigen binding molecule of any one of claims 1 to 48, or the pharmaceutical composition of claim 24, to inhibit the growth of the tumor cells.
